(19) United States
(12) Patent Application Publication
(10) Pub. No.: US 2024/0424143 A1
(43) Pub. Date: Dec. 26, 2024

(54) ENGINEERED MUSCLE AND CENTRAL NERVOUS SYSTEM COMPOSITIONS

(71) Applicants: The Broad Institute, Inc., Cambridge, MA (US); President and Fellows of Harvard College, Cambridge, MA (US); Massachusetts Institute of Technology, Cambridge, MA (US)

(72) Inventors: Pardis Sabeti, Cambridge, MA (US); Mohammadsharif Tabebordbar, Cambridge, MA (US); Simon Ye, Cambridge, MA (US)

(21) Appl. No.: 18/689,897

(22) PCT Filed: Sep. 8, 2022
(86) PCT No.: PCT/US22/76117

§ 371 Date: Mar. 7, 2024

Related U.S. Application Data
(60) Provisional application No. 63/242,008, filed on Sep. 8, 2021.

(51) Int. Cl. A61K 48/00; C12N 15/86

(52) U.S. Cl. CPC A61K 48/0058; C12N 15/86; C12N 2750/14122; C12N 2750/14143; C12N 2750/14152

(57) ABSTRACT

Described in several exemplary embodiments are compositions including a targeting moiety effective to target a central nervous system cell and formulations thereof. In certain embodiments, the targeting moiety is composed of one or more n-mer inserts, that can include one or more RGD motifs, and/or one or more P-motifs. Also described in certain example embodiments are vector systems configured to generate polypeptides containing the one or more targeting moieties. Also described herein are methods of generating a targeting moiety effective to target a central nervous system cell and using the compositions containing the targeting moieties described herein, such as to deliver a cargo to a subject and/or treat a central nervous system disease, disorder, or system thereof.

### CROSS-REFERENCE TO RELATED APPLICATIONS

[0001] This application claims the benefit of and priority to U.S. Provisional Patent Application No. 63/242,008, filed on Sep. 8, 2021, the contents of which is incorporated by reference herein in its entirety.

### REFERENCE TO AN ELECTRONIC SEQUENCE LISTING

[0002] The contents of the electronic sequence listing (“BROD-5455WP_ST26.xml”; Size is 359,525 bytes and it was created on Sep. 7, 2022) is herein incorporated by reference in its entirety.

### TECHNICAL FIELD

[0003] The subject matter disclosed herein is generally directed to engineered central nervous system targeting compositions including, but not limited to, recombinant adeno-associated virus (AAV) vectors, and systems, compositions, and uses thereof.

### BACKGROUND

[0004] Recombinant AAVs (rAAVs) are the most commonly used delivery vehicles for gene therapy and gene editing. Nonetheless, rAAVs that contain natural capsid variants have limited cell tropism. Indeed, rAAVs used today mainly infect the liver after systemic delivery. Further, the transduction efficiency of conventional rAAVs in other cell-types, tissues, and organs by these conventional rAAVs with natural capsid variants is limited. Therefore, AAV-mediated polynucleotide delivery for diseased that affect cells, tissues, and organs other than the liver, such as the central nervous system) typically requires an injection of a large dose of virus (typically about 2×10¹⁴ vg/kg), which often results in liver toxicity. Furthermore, because large doses are required when using conventional rAAVs, manufacturing sufficient amounts of a therapeutic rAAV needed to dose adult patients is extremely challenging. Additionally, due to differences in gene expression and physiology, mouse and primate models respond differently to viral capsids. Transduction efficiency of different virus particles varies between different species, and as a result, preclinical studies in mice often do not accurately reflect results in primates, including humans. As such there exists a need for improved rAAVs for use in the treatment of various genetic diseases.

[0005] Citation or identification of any document in this application is not an admission that such a document is available as prior art to the present invention.

### SUMMARY

[0006] Described in certain example embodiments herein are compositions comprising: a targeting moiety effective to target a muscle cell or both a muscle cell and a central nervous system (CNS) cell, wherein the targeting moiety comprises one or more n-mer inserts each comprising one or more P-motifs, wherein at least one P-motif comprises or consists of the amino acid sequence XₘPX₁QGTX₂RXₙ (SEQ ID NO: 1699), wherein X₁, X₂, Xₘ, and Xₙ are each independently selected from any amino acid, wherein m is 0, 1, 2, or 3, and wherein n is 0, 1, 2, 3, 4, 5, 6, or 7; or one or more RGD motifs, wherein at least one of the RGD motifs comprises or consists of XₘRGDXₙ, wherein m is 0-4 amino acids, wherein n is 0-15 amino acids, and wherein Xₘ, and Xₙ are each independently selected from any amino acid; or both, and optionally a cargo, wherein the cargo is coupled to or is otherwise associated with the targeting moiety.

[0007] In certain example embodiments, the one or more of the one or more P-motifs and one or more of the RGD motifs are each independently selected from any one set forth in one or more of SEQ ID NOs: 4-1698 (Tables 4-11).

[0008] In certain example embodiments, the one or more RGD motifs and/or the one or more P motifs are selected from any one or more set forth in: SEQ ID NOs: 4-250 (Table 4); SEQ ID NOs: 497-647 (Table 6); SEQ ID NOs: 799-1074 (Table 8); SEQ ID NOs: 1301-1497 (Table 10); or any combination thereof.

[0009] In certain example embodiments, the one or more RGD motifs and/or the one or more P motifs are selected from any one or more set forth in: SEQ ID NOs: 251-496 (Table 5); SEQ ID NOs: 648-798 (Table 7); SEQ ID NOs: 1498-1698 (Table 9); SEQ ID NOs: 1075-1300 (Table 11); or any combination thereof.

[0010] In certain example embodiments, the one or more RGD motifs and/or the one or more P motifs are selected from any one or more set forth in: SEQ ID NOs: 4-250 (Table 4) and/or SEQ ID NOs: 251-496 (Table 5); SEQ ID NOs: 497-647 (Table 6) and/or SEQ ID NOs: 648-798 (Table 7); SEQ ID NOs: 799-1074 (Table 8) and/or SEQ ID NOs: 1498-1698 (Table 9); or SEQ ID NOs: 1301-1497 (Table 10) and/or SEQ ID NOs: 1075-1300 (Table 11).

[0011] In certain example embodiments, the targeting moiety is effective target a skeletal muscle cell; a cardiac muscle cell; a skeletal muscle cell and a CNS cell; or a cardiac muscle cell and a CNS cell.

[0012] In certain example embodiments, the one or more n-mer inserts are each 3-25 or 3-15 amino acids in length.

[0013] In certain example embodiments: X₁ is S, T, or A; X₂ is L, V, F, or I; or both.

[0014] In certain example embodiments, the one or more RGD motifs and/or one or more P-motif is immediately preceded by AQ or DG in the targeting moiety.

[0015] In certain example embodiments, the targeting moiety comprises a polypeptide, a polynucleotide, a lipid, a polymer, a sugar, or a combination thereof.

[0016] In certain example embodiments, the targeting moiety comprises a viral protein.

[0017] In certain example embodiments, the viral protein is a capsid protein.

[0018] In certain example embodiments, one or more of the n-mer motifs are incorporated into the viral protein such that at least one of the one or more RGD motifs, at least one of the one or more P motifs, or both is/are located between two amino acids of the viral protein such that at least one of the one or more RGD motifs and/or one or more P-motifs is external to a viral capsid.

[0019] In certain example embodiments, the viral protein is an adeno associated virus (AAV) protein.

[0020] In certain example embodiments, the AAV protein is an AAV capsid protein.

[0021] In certain example embodiments, one or more of the one or more n-mer inserts are incorporated into the AAV protein such that at least one or more of the one more RGD motifs and/or one or more of the at least one or more P motifs are each inserted between any two contiguous amino acids independently selected from amino acids 262-269, 327-332, 382-386, 452-460, 488-505, 527-539, 545-558, 581-593, 598-599, 704-714, or any combination thereof in an AAV9 capsid polypeptide or in an analogous position in an AAV1, AAV2, AAV3, AAV4, AAV5, AAV6, AAV7, AAV8, AAV rh.74, AAV rh.10 capsid polypeptide.

[0022] In certain example embodiments, at least one of the one or more n-mer inserts is incorporated into the AAV protein such that at least one of the one more RGD motifs and/or at least one of the one or more P motifs is inserted between amino acids 588 and 589 in an AAV9 capsid polypeptide or in an analogous position in an AAV1, AAV2, AAV3, AAV4, AAV5, AAV6, AAV7, AAV8, AAV rh.74, AAV rh.10 capsid polypeptide.

[0023] In certain example embodiments, the AAV capsid protein is an engineered AAV capsid protein having reduced or eliminated uptake in a non-CNS and/or non-muscle cell as compared to a corresponding wild-type AAV capsid polypeptide.

[0024] In certain example embodiments, the non-CNS and/or non-muscle cell is a liver cell.

[0025] In certain example embodiments, the wild-type capsid polypeptide is an AAV1, AAV2, AAV3, AAV4, AAV5, AAV6, AAV7, AAV8, AAV9, AAV rh.74, or AAV rh.10 capsid polypeptide.

[0026] In certain example embodiments, the engineered AAV capsid protein comprises one or more mutations that result in reduced or eliminated uptake in a non-CNS and/or non-muscle cell.

[0027] In certain example embodiments, the one or more mutations are in position 267, in position 269, in position 504, in position 505, in position 590, or any combination thereof in the AAV9 capsid protein (SEQ ID NO: 1) or in one or more positions corresponding thereto in a non-AAV9 capsid polypeptide.

[0028] In certain example embodiments, the non-AAV9 capsid protein is an AAV1, AAV2, AAV3, AAV4, AAV5, AAV6, AAV7, AAV8, AAV rh.74, or AAV rh.10 capsid polypeptide.

[0029] In certain example embodiments the mutation in position 267 in the AAV9 capsid protein (SEQ ID NO: 1) or position corresponding thereto in a non-AAV9 capsid polypeptide is a G or X mutation to A, wherein X is any amino acid.

[0030] In certain example embodiments, the mutation in position 269 in the AAV9 capsid protein (SEQ ID NO: 1) or position corresponding thereto in a non-AAV9 capsid polypeptide is an S or X to T mutation, wherein X is any amino acid.

[0031] In certain example embodiments, the mutation in position 504 in the AAV9 capsid protein (SEQ ID NO: 1) or position corresponding thereto in a non-AAV9 capsid polypeptide is a G or X to A mutation, wherein X is any amino acid.

[0032] In certain example embodiments, the mutation in position 505 in the AAV9 capsid protein (SEQ ID NO: 1) or position corresponding thereto in a non-AAV9 capsid polypeptide is a P or X to A mutation, wherein X is any amino acid.

[0033] In certain example embodiments, the mutation in position 590 in the AAV9 capsid protein (SEQ ID NO: 1) or position corresponding thereto in a non-AAV9 capsid polypeptide is a Q or X to A mutation, wherein X is any amino acid.

[0034] In certain example embodiments, the engineered AAV capsid protein is an engineered AAV9 capsid polypeptide comprising a mutation at position 267, position 269 or both of a wild-type AAV9 capsid protein (SEQ ID NO: 1), wherein the mutation at position 267 is a G to A mutation and wherein the mutation at position 269 is an S to T mutation.

[0035] In certain example embodiments, the engineered AAV capsid protein is an engineered AAV9 capsid polypeptide comprising a mutation at position 590 of a wild-type AAV9 capsid protein (SEQ ID NO: 1), wherein the mutation at position 509 is a Q to A mutation.

[0036] In certain example embodiments, the engineered AAV capsid protein is an engineered AAV9 capsid polypeptide comprising a mutation at position 504, position 505, or both of a wild-type AAV9 capsid protein (SEQ ID NO: 1), wherein the mutation at position 504 is a G to A mutation and wherein the mutation at position 505 is a P to A mutation.

[0037] In certain example embodiments, the composition is an engineered viral particle.

[0038] In certain example embodiments, the engineered viral particle is an engineered AAV viral particle.

[0039] In certain example embodiments, the AAV viral particle is an engineered AAV1, AAV2, AAV3, AAV4, AAV5, AAV6, AAV7, AAV8, AAV9, AAV rh.74, or AAV rh.10 viral particle.

[0040] In certain example embodiments, the optional cargo is capable of treating or preventing a CNS, a muscle disease or disorder, or both.

[0041] In certain example embodiments, the muscle disease and/or CNS disease or disorder is an auto immune disease; a cancer; a muscular dystrophy; a neuro-muscular disease; a sugar or glycogen storage disease; an expanded repeat disease; a dominant negative disease; a cardiomyopathy; a viral disease; a progeroid disease; or any combination thereof.

[0042] In certain example embodiments, the optional cargo is a morpholino, a peptide-linked morpholino, an antisense oligonucleotide, a PMO, a therapeutic transgene, a polynucleotide encoding a therapeutic polypeptide or peptide, a PPMO, one or more peptides, one or more polynucleotides encoding a CRISPR-Cas protein, a guide RNA, or both, a ribonucleoprotein, wherein the ribonucleoprotein comprises a CRISPR-Cas system molecule, a therapeutic transgene RNA, or other gene modifying or therapeutic RNA and/or protein, or any combination thereof.

[0043] In certain example embodiments, the optional cargo is capable of inducing exon skipping in a gene, optionally a dystrophin gene.

[0044] In certain example embodiments, the cargo is a mini- or micro-dystrophin gene.

[0045] In certain example embodiments, the mini- or micro-dystrophin gene comprises spectrin-like repeats 1, 2, 3, and 24, and optionally an nNOS domain.

[0046] In certain example embodiments, the expanded repeat disease is Huntington's disease, a Myotonic Dystrophy, or Facioscapulohumeral muscular dystrophy (FSHD).

[0047] In certain example embodiments, the muscular dystrophy is Duchene muscular dystrophy, Becker Muscular dystrophy, a Limb-Girdle muscular dystrophy, an Emery-Dreifuss muscular dystrophy, a myotonic dystrophy, or FSHD.

[0048] In certain example embodiments, the myotonic dystrophy is Type 1 or Type 2.

[0049] In certain example embodiments, the cardiomyopathy is dilated cardiomyopathy, hypertrophic cardiomyopathy, DMD-associated cardiomyopathy, or Dannon disease.

[0050] In certain example embodiments, the sugar or glycogen storage disease is a MPS type III disease or Pompe disease. In certain example embodiments, the MPS type III disease, is MPS Type IIIA, IIIB, IIIC, or IIID.

[0051] In certain example embodiments, the neuro-muscular disease is Charcot-Marie-Tooth disease or Friedreich's Ataxia.

[0052] Described in certain example embodiments herein are vector systems comprising a vector comprising: one or more polynucleotides, wherein at least one of the one or more polynucleotides encodes all or part of a targeting moiety effective to target a muscle cell or both a muscle cell and a central nervous system (CNS) cell, wherein the targeting moiety comprises one or more n-mer inserts comprising one or more P-motifs, wherein at least one P-motif comprises or consists of the amino acid sequence XₘPX₁QGTX₂RXₙ, wherein X₁, X₂, Xₘ, and Xₙ are each independently selected from any amino acid, wherein m is 0, 1, 2, or 3, and wherein n is 0, 1, 2, 3, 4, 5, 6, or 7; or one or more RGD motifs, wherein at least one of the RGD motifs comprises or consists of XₘRGDXₙ, wherein m is 0-4 amino acids, wherein n is 0-15 amino acids, and wherein Xₘ, and Xₙ are each independently selected from any amino acid; or both, wherein at least one of the one or more polynucleotides encodes the at least one RGD motif, at least one P-motif, or both; and optionally, a regulatory element operatively coupled to one or more of the one or more polynucleotides.

[0053] In certain example embodiments, the one or more of the one or more P-motifs and one or more of the RGD motifs are each independently selected from any one set forth in any one or more of SEQ ID NOs: 4-1698 (Tables 4-11).

[0054] In certain example embodiments, the one or more RGD motifs and/or the one or more P motifs are selected from any one or more set forth in: SEQ ID NOs: 4-250 (Table 4); SEQ ID NOs: 497-647 (Table 6); SEQ ID NOs: 799-1074 (Table 8); SEQ ID NOs: 1301-1497 (Table 10); or any combination thereof

[0055] In certain example embodiments, the one or more RGD motifs and/or the one or more P motifs are selected from any one or more set forth in: SEQ ID NOs: 251-496 (Table 5); SEQ ID NOs: 648-798 (Table 7); SEQ ID NOs: 1498-1698 (Table 9); SEQ ID NOs: 1075-1300 (Table 11); or any combination thereof

[0056] In certain example embodiments, the one or more RGD motifs and/or the one or more P motifs are selected from any one or more set forth in: SEQ ID NOs: 4-250 (Table 4) and/or SEQ ID NOs: 251-496 (Table 5); SEQ ID NOs: 497-647 (Table 6) and/or SEQ ID NOs: 648-798 (Table 7); SEQ ID NOs: 799-1074 (Table 8) and/or SEQ ID NOs: 1498-1698 (Table 9); or SEQ ID NOs: 1301-1497 (Table 10) and/or SEQ ID NOs: 1075-1300 (Table 11).

[0057] In certain example embodiments, the targeting moiety is effective at targeting a skeletal muscle cell; a cardiac muscle cell; a skeletal muscle cell and a CNS cell; or a cardiac muscle cell and a CNS cell.

[0058] In certain example embodiments, the one or more n-mer motifs are each 3-25 or 3-15 amino acids in length.

[0059] In certain example embodiments, X₁ is S, T, or A; X₂ is L, V, F, or I, or both.

[0060] In certain example embodiments, the n-mer insert is immediately preceded by AQ or DG in the targeting moiety.

[0061] In certain example embodiments, the vector system further comprises a cargo.

[0062] In certain example embodiments, the cargo is a cargo polynucleotide and is optionally operatively coupled to one or more of the one or more polynucleotides encoding all or part of the targeting moiety.

[0063] In certain example embodiments, the vector system is capable of producing virus particles, virus particles that contain the cargo, or both.

[0064] In certain example embodiments, the vector system is capable of producing a polypeptide comprising one or more of the targeting moieties.

[0065] In certain example embodiments, the polypeptide is a viral polypeptide.

[0066] In certain example embodiments, the viral polypeptide is a capsid polypeptide.

[0067] In certain example embodiments, the capsid polypeptide is an adeno associated virus (AAV) capsid polypeptide.

[0068] In certain example embodiments, the virus particles are AAV virus particles.

[0069] In certain example embodiments, the AAV virus particles or AAV capsid polypeptide are engineered AAV1, AAV2, AAV3, AAV4, AAV5, AAV6, AAV7, AAV8, AAV9, AAV rh.74, or AAV rh.10 viral particles or polypeptides.

[0070] In certain example embodiments, one or more of the one or more n-mer inserts are incorporated in the targeting moiety such that at least one of the one or more RGD motifs, at least one of the one or more P motifs, or both is/are located between two amino acids of the viral protein such that at least one of the one or more RGD motifs and/or one or more P-motifs is external to a viral capsid of the virus particles.

[0071] In certain example embodiments, one or more of the one or more n-mer inserts are incorporated into the AAV protein such that at least one or more of the one more RGD motifs and/or at least one or more of the one or more P motifs are each inserted between any two contiguous amino acids independently selected from amino acids 262-269, 327-332, 382-386, 452-460, 488-505, 527-539, 545-558, 581-593, 598-599, 704-714, or any combination thereof in an AAV9 capsid polypeptide or in an analogous position in an AAV1, AAV2, AAV3, AAV4, AAV5, AAV6, AAV7, AAV8, AAV rh.74, AAV rh.10 capsid polypeptide.

[0072] In certain example embodiments, at least one of the one or more n-mer inserts is incorporated into the AAV protein such that at least one of the one more RGD motifs and/or at least one of the one or more P motifs is inserted between amino acids 588 and 589 in the AAV9 capsid polynucleotide or in an analogous position in an AAV1, AAV2, AAV3, AAV4, AAV5, AAV6, AAV7, AAV8, AAV rh.74, AAV rh.10 capsid polypeptide.

[0073] In certain example embodiments, the AAV capsid protein is an engineered AAV capsid protein having reduced or eliminated uptake in a non-CNS cell or a non-muscle cell as compared to a corresponding wild-type AAV capsid polypeptide.

[0074] In certain example embodiments, the non-CNS or non-muscle cell is a liver cell.

[0075] In certain example embodiments, the wild-type capsid polypeptide is an AAV1, AAV2, AAV3, AAV4, AAV5, AAV6, AAV7, AAV8, AAV9, AAV rh.74, or AAV rh.10 capsid polypeptide.

[0076] In certain example embodiments, wherein the engineered AAV capsid protein comprises one or more mutations that result in reduced or eliminated uptake in a non-CNS cell.

[0077] In certain example embodiments, the one or more mutations are in position 267, in position 269, in position 504, in position 505, in position 590, or any combination thereof in the AAV9 capsid protein (SEQ ID NO: 1) or in one or more positions corresponding thereto in a non-AAV9 capsid polypeptide.

[0078] In certain example embodiments, the non-AAV9 capsid protein is an AAV1, AAV2, AAV3, AAV4, AAV5, AAV6, AAV7, AAV8, AAV rh.74, or AAV rh.10 capsid polypeptide.

[0079] In certain example embodiments, the mutation in position 267 in the AAV9 capsid protein (SEQ ID NO: 1) or position corresponding thereto in a non-AAV9 capsid polypeptide is a G or X mutation to A, wherein X is any amino acid.

[0080] In certain example embodiments, the mutation in position 269 in the AAV9 capsid protein (SEQ ID NO: 1) or position corresponding thereto in a non-AAV9 capsid polypeptide is an S or X to T mutation, wherein X is any amino acid.

[0081] In certain example embodiments, the mutation in position 504 in the AAV9 capsid protein (SEQ ID NO: 1) or position corresponding thereto in a non-AAV9 capsid polypeptide is a G or X to A mutation, wherein X is any amino acid.

[0082] In certain example embodiments, the mutation in position 505 in the AAV9 capsid protein (SEQ ID NO: 1) or position corresponding thereto in a non-AAV9 capsid polypeptide is a P or X to A mutation, wherein X is any amino acid.

[0083] In certain example embodiments, the mutation in position 590 in the AAV9 capsid protein (SEQ ID NO: 1) or position corresponding thereto in a non-AAV9 capsid polypeptide is a Q or X to A mutation, wherein X is any amino acid.

[0084] In certain example embodiments, the engineered AAV capsid protein is an engineered AAV9 capsid polypeptide comprising a mutation at position 267, position 269 or both of a wild-type AAV9 capsid protein (SEQ ID NO: 1), wherein the mutation at position 267 is a G to A mutation and wherein the mutation at position 269 is an S to T mutation.

[0085] In certain example embodiments, the engineered AAV capsid protein is an engineered AAV9 capsid polypeptide comprising a mutation at position 590 of a wild-type AAV9 capsid protein (SEQ ID NO: 1), wherein the mutation at position 509 is a Q to A mutation.

[0086] In certain example embodiments, the engineered AAV capsid protein is an engineered AAV9 capsid polypeptide comprising a mutation at position 504, position 505, or both of a wild-type AAV9 capsid protein (SEQ ID NO: 1), wherein the mutation at position 504 is a G to A mutation and wherein the mutation at position 505 is a P to A mutation.

[0087] In certain example embodiments, the vector comprising the one or more polynucleotides does not comprise splice regulatory elements.

[0088] In certain example embodiments, the vector further comprises a polynucleotide that encodes a viral rep protein.

[0089] In certain example embodiments, the viral rep protein is an AAV rep protein.

[0090] In certain example embodiments, the polynucleotide that encodes the viral rep protein is on the same vector or a different vector as the one or more polynucleotides.

[0091] In certain example embodiments, the polynucleotide that encodes the viral rep protein is operatively coupled to a regulatory element.

[0092] In certain example embodiments, the vector system is capable of producing a composition or portion thereof as described in any of the above paragraphs and/or elsewhere herein.

[0093] Described in certain example embodiments are polypeptide encoded, produced, or both by a vector system as described in any one or more of the paragraphs above or elsewhere herein.

[0094] In certain example embodiments, the polypeptide is a viral polypeptide.

[0095] In certain example embodiments, the viral polypeptide is an AAV polypeptide.

[0096] In certain example embodiments, the polypeptide is coupled to or otherwise associated with a cargo.

[0097] Described in certain example embodiments are particles produced by a vector system as in any one of claims 48-88, optionally including a polypeptide as in any one of the above paragraphs or elsewhere herein.

[0098] In certain example embodiments, the particle is a viral particle.

[0099] In certain example embodiments, the viral particle is an adeno-associated virus (AAV) particle, lentiviral particle, or a retroviral particle.

[0100] In certain example embodiments, the particle comprises a cargo.

[0101] In certain example embodiments, the viral particle has a muscle tropism, or a muscle and central nervous system (CNS) tropism.

[0102] In certain example embodiments, the cargo is capable or preventing a CNS disease or, a muscle disease or disorder, or both a CNS and muscle disease or disorder.

[0103] In certain example embodiments, the CNS or muscle disease or disorder is (a) an auto immune disease; (b) a cancer; (c) a muscular dystrophy; (d) a neuro-muscular disease; (e) a sugar or glycogen storage disease; (f) an expanded repeat disease; (g) a dominant negative disease; (h) a cardiomyopathy; (i) a viral disease; (j) a progeroid disease; or (k) any combination thereof.

[0104] In certain example embodiments, the cargo is capable of inducing exon skipping in a gene.

[0105] In certain example embodiments, the cargo is capable of inducing exon skipping in a dystrophin gene.

[0106] In certain example embodiments, the cargo is a mini- or micro-dystrophin gene.

[0107] In certain example embodiments, the mini- or micro-dystrophin gene comprises spectrin-like repeats 1, 2, 3, and 24, and optionally an nNOS domain.

[0108] In certain example embodiments, the expanded repeat disease is Huntington's disease, a Myotonic Dystrophy, or Facioscapulohumeral muscular dystrophy (FSHD).

[0109] In certain example embodiments, the muscular dystrophy is Duchene muscular dystrophy, Becker Muscular dystrophy, a Limb-Girdle muscular dystrophy, an Emery-Dreifuss muscular dystrophy, a myotonic dystrophy, or FSHD.

[0110] In certain example embodiments, the myotonic dystrophy is Type 1 or Type 2.

[0111] In certain example embodiments, the cardiomyopathy is dilated cardiomyopathy, hypertrophic cardiomyopathy, DMD-associated cardiomyopathy, or Dannon disease.

[0112] In certain example embodiments, the sugar or glycogen storage disease is a MPS type III disease or Pompe disease.

[0113] In certain example embodiments, wherein the MPS type III disease, is MPS Type IIIA, IIIB, IIIC, or IIID.

[0114] In certain example embodiments, the neuro-muscular disease is Charcot-Marie-Tooth disease or Friedreich's Ataxia.

[0115] In certain example embodiments, the polypeptide, the particle, or both have increased muscle cell potency, muscle cell specificity, reduced immunogenicity, or any combination thereof

[0116] Described in certain example embodiments are cells comprising: a composition as in any one of the above paragraphs and elsewhere herein; a vector system as in any one of the above paragraphs and elsewhere herein; a polypeptide as in any one of the above paragraphs and elsewhere herein; a particle as in any one of the above paragraphs and elsewhere herein; or a combination thereof.

[0117] In certain example embodiments, the cell is prokaryotic. In certain example embodiments, the cell is eukaryotic.

[0118] Described in certain example embodiments herein are pharmaceutical formulations comprising: a composition as in any one of the above paragraphs and elsewhere herein; a vector system as in any one of the above paragraphs and elsewhere herein; a polypeptide as in any one of the above paragraphs and elsewhere herein; a particle as in any one of the above paragraphs and elsewhere herein; a cell as in any one of the above paragraphs and elsewhere herein; or a combination thereof; and a pharmaceutically acceptable carrier.

[0119] Described in certain example embodiments herein are methods of treating a muscle disease, disorder, or a symptom thereof, or both a muscle and a central nervous system disease, disorder, or a symptom thereof comprising: administering, to the subject in need thereof, a composition as in any one of the above paragraphs and elsewhere herein a vector system as in any one of the above paragraphs and elsewhere herein; a polypeptide as in any one of the above paragraphs and elsewhere herein a particle as in any one of the above paragraphs and elsewhere herein a cell as in any one of the above paragraphs and elsewhere herein; a pharmaceutical formulation as in any one of the above paragraphs and elsewhere herein; or a combination thereof.

[0120] In certain example embodiments, the central nervous system disease or disorder comprises a secondary muscle disease, disorder, or symptom thereof.

[0121] In certain example embodiments, the central nervous system disease or disorder is Friedreich's Ataxia, Dravet Syndrome, Spinocerebellar Ataxia Type 3, Niemann Pick Type C, Huntington's Disease, Pompe Disease, Myotonic Dystrophy Type 1, Glut1 Deficiency Syndrome (De Vivo Syndrome), Tay-Sachs, Spinal Muscular Atrophy, Alzheimer's disease, Amyotrophic lateral sclerosis (ALS), Danon disease, Rett Syndrome, Angleman Syndrome, or a combination thereof.

[0122] In certain example embodiments, the CNS or muscle disease or disorder is (a) an auto immune disease; (b) a cancer; (c) a muscular dystrophy; (d) a neuro-muscular disease; (e) a sugar or glycogen storage disease; (f) an expanded repeat disease; (g) a dominant negative disease; (h) a cardiomyopathy; (i) a viral disease; (j) a progeroid disease; or (k) any combination thereof.

[0123] In certain example embodiments, the expanded repeat disease is Huntington's disease, a Myotonic Dystrophy, or Facioscapulohumeral muscular dystrophy (FSHD).

[0124] In certain example embodiments, the muscular dystrophy is Duchene muscular dystrophy, Becker Muscular dystrophy, a Limb-Girdle muscular dystrophy, an Emery-Dreifuss muscular dystrophy, a myotonic dystrophy, or FSHD.

[0125] In certain example embodiments, the myotonic dystrophy is Type 1 or Type 2.

[0126] The method of any one of claims 116-122, wherein the cardiomyopathy is dilated cardiomyopathy, hypertrophic cardiomyopathy, DMD-associated cardiomyopathy, or Dannon disease.

[0127] In certain example embodiments, the sugar or glycogen storage disease is a MPS type III disease or Pompe disease.

[0128] In certain example embodiments, the MPS type III disease, is MPS Type IIIA, IIIB, IIIC, or IIID.

[0129] In certain example embodiments, the neuro-muscular disease is Charcot-Marie-Tooth disease or Friedreich's Ataxia.

[0130] These and other aspects, objects, features, and advantages of the example embodiments will become apparent to those having ordinary skill in the art upon consideration of the following detailed description of example embodiments.

### BRIEF DESCRIPTION OF THE DRAWINGS

[0131] An understanding of the features and advantages of the present invention will be obtained by reference to the following detailed description that sets forth illustrative embodiments, in which the principles of the invention may be utilized, and the accompanying drawings of which:

[0132] FIG. 1 shows the adeno-associated virus (AAV) transduction mechanism, which results in production of mRNA from the transgene.

[0133] FIG. 2 shows a graph that can demonstrate that mRNA-based selection of AAV variants can be more stringent than DNA-based selection. The virus library was expressed under the control of a CMV promoter.

[0134] FIGS. 3A-3B show graphs that can demonstrate a correlation between the virus library and vector genome DNA (FIG. 3A) and mRNA (FIG. 3B) in the liver.

[0135] FIGS. 4A-4F show graphs that can demonstrate capsid variants present at the DNA level and expressed at the mRNA level identified in different tissues. For this experiment, the virus library was expressed under the control of a CMV promoter.

[0136] FIGS. 5A-5C show graphs that can demonstrate capsid mRNA expression in different tissues under the control of cell-type specific promoters (as noted on x-axis). CMV was included as an exemplary constitutive promoter. CK8 is a muscle-specific promoter. MHCK7 is a muscle-specific promoter. hSyn is a neuron specific promoter. Expression levels from the cell type-specific promoters have been normalized based on expression levels from the constitutive CMV promoter in each tissue.

[0137] FIGS. 6A-6B show (FIG. 6A) a schematic demonstrating embodiments of a method of producing and selecting capsid variants for tissue-specific gene delivery across species and (FIG. 6B) a schematic demonstrating benchmarking of the top selected capsids.

[0138] FIG. 7 shows a schematic demonstrating embodiments of generating an AAV capsid variant library, particularly insertion of a random n-mer (n=3-15 amino acids) into a wild-type AAV, e.g., AAV9.

[0139] FIG. 8 shows a schematic demonstrating embodiments of generating an AAV capsid variant library, particularly variant AAV particle production. Each capsid variant encapsulates its own coding sequence as the vector genome.

[0140] FIG. 9 shows schematic vector maps of representative AAV capsid plasmid library vectors (see e.g., FIG. 8) that can be used in an AAV vector system to generate an AAV capsid variant library.

[0141] FIG. 10 shows a graph that can demonstrate the viral titer (calculated as AAV9 vector genome/15 cm dish) produced by constructs containing different constitutive and cell-type specific mammalian promoters.

[0142] The figures herein are for illustrative purposes only and are not necessarily drawn to scale.

### DETAILED DESCRIPTION OF THE EXAMPLE EMBODIMENTS

### General Definitions

[0143] Unless defined otherwise, technical and scientific terms used herein have the same meaning as commonly understood by one of ordinary skill in the art to which this disclosure pertains. Definitions of common terms and techniques in molecular biology may be found in Molecular Cloning: A Laboratory Manual, 2^{nd} edition (1989) (Sambrook, Fritsch, and Maniatis); Molecular Cloning: A Laboratory Manual, 4^{th} edition (2012) (Green and Sambrook); Current Protocols in Molecular Biology (1987) (F. M. Ausubel et al. eds.); the series Methods in Enzymology (Academic Press, Inc.): PCR 2: A Practical Approach (1995) (M. J. MacPherson, B. D. Hames, and G. R. Taylor eds.): Antibodies, A Laboratory Manual (1988) (Harlow and Lane, eds.): Antibodies A Laboratory Manual, 2^{nd} edition 2013 (E. A. Greenfield ed.); Animal Cell Culture (1987) (R.I. Freshney, ed.); Benjamin Lewin, Genes IX, published by Jones and Bartlett, 2008 (ISBN 0763752223); Kendrew et al. (eds.), The Encyclopedia of Molecular Biology, published by Blackwell Science Ltd., 1994 (ISBN 0632021829); Robert A. Meyers (ed.), Molecular Biology and Biotechnology: a Comprehensive Desk Reference, published by VCH Publishers, Inc., 1995 (ISBN 9780471185710); Singleton et al., Dictionary of Microbiology and Molecular Biology 2nd ed., J. Wiley & Sons (New York, N.Y. 1994), March, Advanced Organic Chemistry Reactions, Mechanisms and Structure 4th ed., John Wiley & Sons (New York, N.Y. 1992); and Marten H. Hofker and Jan van Deursen, Transgenic Mouse Methods and Protocols, 2^{nd} edition (2011).

[0144] As used herein, the singular forms “a”, “an”, and “the” include both singular and plural referents unless the context clearly dictates otherwise.

[0145] The term “optional” or “optionally” means that the subsequent described event, circumstance or substituent may or may not occur, and that the description includes instances where the event or circumstance occurs and instances where it does not.

[0146] The recitation of numerical ranges by endpoints includes all numbers and fractions subsumed within the respective ranges, as well as the recited endpoints.

[0147] The terms “about” or “approximately” as used herein when referring to a measurable value such as a parameter, an amount, a temporal duration, and the like, are meant to encompass variations of and from the specified value, such as variations of +/−10% or less, +/−5% or less, +/−1% or less, and +/−0.1% or less of and from the specified value, insofar such variations are appropriate to perform in the disclosed invention. It is to be understood that the value to which the modifier “about” or “approximately” refers is itself also specifically, and preferably, disclosed.

[0148] As used herein, a “biological sample” may contain whole cells and/or live cells and/or cell debris. The biological sample may contain (or be derived from) a “bodily fluid”. The present invention encompasses embodiments wherein the bodily fluid is selected from amniotic fluid, aqueous humour, vitreous humour, bile, blood serum, breast milk, cerebrospinal fluid, cerumen (earwax), chyle, chyme, endolymph, perilymph, exudates, feces, female ejaculate, gastric acid, gastric juice, lymph, mucus (including nasal drainage and phlegm), pericardial fluid, peritoneal fluid, pleural fluid, pus, rheum, saliva, sebum (skin oil), semen, sputum, synovial fluid, sweat, tears, urine, vaginal secretion, vomit and mixtures of one or more thereof. Biological samples include cell cultures, bodily fluids, cell cultures from bodily fluids. Bodily fluids may be obtained from a mammal organism, for example by puncture, or other collecting or sampling procedures.

[0149] The terms “subject,” “individual,” and “patient” are used interchangeably herein to refer to a vertebrate, preferably a mammal, more preferably a human. Mammals include, but are not limited to, murines, simians, humans, farm animals, sport animals, and pets. Tissues, cells and their progeny of a biological entity obtained in vivo or cultured in vitro are also encompassed.

[0150] Various embodiments are described hereinafter. It should be noted that the specific embodiments are not intended as an exhaustive description or as a limitation to the broader aspects discussed herein. One aspect described in conjunction with a particular embodiment is not necessarily limited to that embodiment and can be practiced with any other embodiment(s). Reference throughout this specification to “one embodiment”, “an embodiment,” “an example embodiment,” means that a particular feature, structure or characteristic described in connection with the embodiment is included in at least one embodiment of the present invention. Thus, appearances of the phrases “in one embodiment,” “in an embodiment,” or “an example embodiment” in various places throughout this specification are not necessarily all referring to the same embodiment but may. Furthermore, the particular features, structures or characteristics may be combined in any suitable manner, as would be apparent to a person skilled in the art from this disclosure, in one or more embodiments. Furthermore, while some embodiments described herein include some but not other features included in other embodiments, combinations of features of different embodiments are meant to be within the scope of the invention. For example, in the appended claims, any of the claimed embodiments can be used in any combination.

[0151] All publications, published patent documents, and patent applications cited herein are hereby incorporated by reference to the same extent as though each individual publication, published patent document, or patent application was specifically and individually indicated as being incorporated by reference.

### Overview

[0152] Embodiments disclosed herein provide targeting moieties with muscle specificity (e.g., cardiac and/or skeletal muscle (collectively referred to as “muscle-specific” targeting moieties). Embodiments disclosed herein also provide targeting moieties with dual specificity for central nervous system (CNS) and skeletal muscle or CNS and cardiac muscle (collectively referred to as “CNS-muscle specific targeting moieties”). The targeting moieties can be coupled to or otherwise associated with a cargo and/or delivery vehicle or system. Embodiments disclosed herein provide polypeptides and particles that can incorporate one or more of the CNS-muscle- or muscle-specific targeting moieties. The polypeptides and/or particles can be coupled to, attached to, encapsulate, or otherwise incorporate a cargo, thereby associating the cargo with the targeting moiety(ies). Embodiments disclosed herein provide CNS-muscle- or muscle-specific targeting moieties that can contain one or more of an n-mer insert that can contain or be an RGD-motif and/or P-motif as further described herein.

[0153] In some embodiments, the n-mer insert(s) is or contains one or more RGD motifs and/or P-motifs. In some embodiments, one or more of the RGD motifs and/or P-motifs is as set forth in any one or more of Tables 4-11 (SEQ ID NOS: 4-1300), any one or more of Tables 4, 6, 8, and/or 10; any one or more of Tables 5, 7, 9, and/or 11; and/or any one or more of Tables 4 and/or 5; any one or more of Tables 6 and/or 7; any one or more of Tables 8 and/or 9; any one or more of Tables 10 and/or 11, or any combination thereof. In some embodiments, at least one P-motif comprises or consists of the amino acid sequence XₘPX₁QGTX₂RXₙ (SEQ ID NO: 1699), wherein X₁, X₂, Xₘ, and Xₙ are each independently selected from any amino acid, wherein m is 0, 1, 2, or 3, and wherein n is 0, 1, 2, 3, 4, 5, 6, or 7. In some embodiments, at least one of the RGD motifs comprises or consists of XₘRGDXₙ, wherein m is 0-4 amino acids, wherein n is 0-15 amino acids, and wherein Xₘ, and Xₙ are each independently selected from any amino acid. In some embodiments, the muscle specific targeting moieties comprise one or more RGD motifs. In some embodiments, the targeting moieties that have CNS and skeletal and/or cardiac muscle specificity comprise a P-motif, an RGD motif, or both.

[0154] Embodiments disclosed herein provide engineered viral (e.g., adeno-associated virus (AAV)) capsids that can be engineered to confer cell-specific and/or species-specific tropism, such as CNS-muscle or muscle (e.g., a cardiac muscle and/or skeletal muscle) tropism, to an engineered viral (e.g., AAV) particle. Embodiments disclosed herein provide engineered viral polypeptides (e.g., capsid polypeptides) that can include one or more targeting moieties described herein. In some embodiments, the engineered viral polypeptides can be incorporated into viral particles.

[0155] Embodiments disclosed herein also provide methods of generating recombinant AAVs (rAAVs) having engineered capsids that can involve systematically directing the generation of diverse libraries of variants of modified surface structures, such as variant capsid proteins. Embodiments of the method of generating rAAVs having engineered capsids can also include stringent selection of capsid variants capable of targeting a specific cell, tissue, and/or organ type. Embodiments of the method of generating rAAVs having engineered capsids can include stringent selection of capsid variants capable of efficient and/or homogenous transduction in at least two or more species. In one example embodiment, the n-mer insert may result in increased transduction of muscle cells (e.g., cardiac and/or skeletal muscle cells) or both CNS and muscle cells (e.g., cardiac and/or skeletal muscle cells).

[0156] Embodiments disclosed herein provide vectors and systems thereof capable of producing an engineered AAV described herein.

[0157] Embodiments disclosed herein provide cells that can be capable of producing the engineered AAV particles described herein. In some embodiments, the cells include one or more vectors or system thereof described herein.

[0158] Embodiments disclosed herein provide engineered AAVs that can include an engineered capsid described herein. In some embodiments, the engineered AAV can include a cargo polynucleotide to be delivered to a cell. In some embodiments, the cargo polynucleotide is a gene modification polynucleotide.

[0159] Embodiments disclosed herein provide formulations that can contain an engineered AAV vector or system thereof, an engineered AAV capsid, engineered AAV particles including an engineered AAV capsid described herein, and/or an engineered cell described herein that contains an engineered AAV capsid, and/or an engineered AAV vector or system thereof. In some embodiments, the formulation can also include a pharmaceutically acceptable carrier. The formulations described herein can be delivered to a subject in need thereof or a cell.

[0160] Embodiments disclosed herein also provide kits that contain one or more of the one or more of the polypeptides, polynucleotides, vectors, engineered AAV capsids, engineered AAV particles, cells, or other components described herein and combinations thereof and pharmaceutical formulations described herein. In embodiments, one or more of the polypeptides, polynucleotides, vectors, engineered AAV capsids, engineered AAV particles cells, and combinations thereof described herein can be presented as a combination kit.

[0161] Embodiments disclosed herein provide methods of using the engineered AAVs having a cell-specific tropism described herein to deliver, for example, a therapeutic polynucleotide to a cell. In this way, the engineered AAVs described herein can be used to treat and/or prevent a disease in a subject in need thereof. Embodiments disclosed herein also provide methods of delivering the engineered AAV capsids, engineered AAV virus particles, engineered AAV vectors or systems thereof and/or formulations thereof to a cell. Also provided herein are methods of treating a subject in need thereof by delivering an engineered AAV particle, engineered AAV capsid, engineered AAV capsid vector or system thereof, an engineered cell, and/or formulation thereof to the subject.

[0162] Additional features and advantages of the embodiments engineered AAVs and methods of making and using the engineered AAVs are further described herein.

### Targeting Moieties and Compositions

[0163] Generally, described herein are compositions containing one or more CNS-muscle specific or muscle specific (e.g., cardiac muscle specific and/or skeletal muscle specific) targeting moieties that can effectively target muscle cells or CNS and muscle cells. In some embodiments, one or more CNS-muscle specific or muscle specific targeting moieties can be incorporated into a delivery vehicle, agent, or system thereof so as to provide CNS-muscle specific or muscle specific targeting capability to the delivery vehicle, agent, or system thereof. Exemplary delivery vehicles include, without limitation, viral particles, (e.g., AAV viral particles), micelles, liposomes, exosomes, and the like. Exemplary delivery vehicles in which the CNS-muscle specific or muscle specific targeting-moieties can be incorporated are described in greater detail elsewhere herein. In some embodiments, the CNS-muscle specific or muscle specific-targeting moieties can be indirectly or directly coupled to a cargo and thus provide CNS-muscle specific or muscle specific to the coupled cargo. In some embodiments, the composition can be specific for CNS and muscle cells or a muscle cell (e.g., as conferred by the CNS-muscle specific or muscle specific targeting moieties described herein) and have reduced specificity for a non-CNS or a non-muscle cell (including, but not limited to, a liver cell). In some embodiments, the CNS-muscle specific or muscle specific targeting moiety can specifically interact with or otherwise associate with one or more AAV receptors on CNS and/or muscle cells, thus providing CNS and muscle or muscle specificity (or tropism). Methods of generating and identifying CNS-muscle specific or muscle specific targeting moieties are described in greater detail elsewhere herein.

### CNS and Muscle Specific or Muscle Specific Targeting Moieties

[0164] Described herein are targeting moieties capable of specifically targeting, a muscle (e.g., a cardiac muscle cell and/or skeletal muscle) cell, or both muscle cells and CNS cells. As used in this context herein, “targeting” refers to the ability to, in a target specific manner, recognize, bind, associate with, transduce or infect, or otherwise interact with a target molecule or moiety such that recognition, binding, association, affinity, avidity, transduction or infection, and/or other interaction with the target molecule or moiety by the targeting moiety is greater, more efficient, or otherwise more selective for the target molecule or moiety as compared with its recognition, binding, association, affinity, avidity, transduction or infection, and/or other interaction with a non-target molecule or moiety. For example, a CNS-specific targeting moiety has increased and/or more efficient or selective recognition, binding, association, affinity, avidity, transduction or infection, and/or other interaction of or with CNS cells as compared to non-CNS cells. Likewise, a muscle-specific targeting moiety has increased and/or more efficient or selective recognition, binding, association, affinity, avidity, transduction or infection, and/or other interaction of or with muscle cells as compared to non-muscle cells. A targeting moiety that is both CNS and muscle cell specific has increased and/or more efficient or selective recognition, binding, association, affinity, avidity, transduction or infection, and/or other interaction of or with CNS cells as compared to non-CNS and non-muscle cells.

[0165] In some embodiments, the targeting moiety can be or include one or more n-mer inserst described herein. The n-mer insert can be (consists of) or contain (comprises) an RGD motif, a P-motif, or both. Generally, n-mer inserts are short (e.g., about 3 to about 15, 20, or 25) amino acid sequences where each amino acid of the n-mer insert can be selected from any amino acid. In some embodiments, the n-mer insert is 3, 4, 5, 6, 7, 8, 9, 10, 11, 12, 13, 14, 15, 16, 17, 18, 19, 20, 21, 22, 23, 24, or 25 amino acids in length

[0166] In some embodiments, the n-mer insert is or contains a P-motif The term “P-motif” as used herein refers to an amino acid having the sequence XₘPX₁QGTX₂RXₙ (SEQ ID NO: 1699), wherein X₁, X₂, Xₘ, and Xₙ are each independently selected from any amino acid, wherein m is 0, 1, 2, or 3, and wherein n is 0, 1, 2, 3, 4, 5, 6, or 7. In some embodiments, the P-motif has the amino acid sequence PX₁QGTX₂RXₙ, where X₁, X₂, Xₙ, are each selected from any amino acid and where n is 0, 1, 2, 3, 4, 5, 6, or 7. Exemplary P-motifs are described in greater detail elsewhere herein.

[0167] In some embodiments, the n-mer insert is (consists of) or include (comprises) an “RGD” motif. An “RGD” motif generally refers to the presence of the amino acids RGD within the n-mer insert. In some embodiments, the RGD is the first three amino acids of the n-mer insert. Thus, in some embodiments the n-mer can have a sequence of RGD or RGDXₙ, where n can be 3-15 amino acids, where X can be any amino acid, and where each amino acid present can each be independently selected from the others from the group of: any amino acid. In some embodiments, the n-mer insert can be RGD (3-mer), RGDX₁ (4-mer), RGDX₁X₂ (5-mer), RGDX₁X₂X₃ (6-mer), RGDX₁X₂X₃X₄ (7 mer), RGDX₁X₂X₃X₄X₅ (8 mer), or RGDX₁X₂X₃X₄X₅X₆ (9-mer), RGD₁X₂X₃X₄X₅X₆X₇ (10-mer), RGD₁X₂X₃X₄X₅X₆X₇X₈ (11-mer), RGDX₁X₂X₃X₄X₅X₆X₇X₈X₉ (12-mer), RGDX₁X₂X₃X₄X₅X₆X₇X₈X₉X₁₀ (13-mer), RGDX₁X₂X₃X₄X₅X₆X₇X₈X₉X₁₀X₁₁ (14-mer), or RGDX₁X₂X₃X₄X₅X₆X₇X₈X₉X₁₀X₁₁X₁₂ (15-mer), where X₁, X₂, X₃, X₄, X₅, X₆, X₇, X₈, X₉, X₁₀, X₁₁, X₁₂ can each be independently selected and can be any amino acid. In some embodiments, X₁ can be L, T, A, M, V, Q, or M. In some embodiments, X₂ can be T, M, S, N, L, A, or I. In some embodiments, X₃ can be T, E, N, O, S, Q, Y, A, or D. In some embodiments, X₄ can be P, Y, K, L, H, T, or S.

[0168] In certain example embodiments, the RGD motif has a formula of XₘRGDXₙ, wherein m is 0-4 amino acids, wherein n is 0-15 amino acids, wherein X is any amino acid, and wherein each X amino acid present is independently selected from the others from the group of: any amino acid. In certain example embodiments, the RGD motif has the formula RGDXₙ, wherein n is 4 or 5, wherein X is any amino acid, and wherein each X amino acid present is independently selected from the others from the group consisting of: any amino acid or any specific combinations described elsewhere herein.

[0169] In some embodiments, one or more of the n-mer inserts, RGD motifs, and/or P-motifs is or includes a motif as set forth in in any one or more of Tables 4-11 (SEQ ID NOS: 4-1300), any one or more of Tables 4, 6, 8, and/or 10; any one or more of Tables 5, 7, 9, and/or 11; and/or any one or more of Tables 4 and/or 5; any one or more of Tables 6 and/or 7; any one or more of Tables 8 and/or 9; any one or more of Tables 10 and/or 11, or any combination thereof. In some embodiments, at least one P-motif comprises or consists of the amino acid sequence XₘPX₁QGTX₂RXₙ (SEQ ID NO: 1699), wherein X₁, X₂, Xₘ, and Xₙ are each independently selected from any amino acid, wherein m is 0, 1, 2, or 3, and wherein n is 0, 1, 2, 3, 4, 5, 6, or 7. In some embodiments, at least one P-motif has the amino acid sequence PX₁QGTX₂RXₙ (SEQ ID NO: 1699), where X₁, X₂, Xₙ, are each selected from any amino acid and where n is 0, 1, 2, 3, 4, 5, 6, or 7. In some embodiments, at least one of the RGD motifs comprises or consists of XₘRGDXₙ, wherein m is 0-4 amino acids, wherein n is 0-15 amino acids, and wherein Xₘ, and Xₙ are each independently selected from any amino acid. In some embodiments, the muscle specific targeting moieties comprise one or more RGD motifs. In some embodiments, the targeting moieties that have CNS and skeletal and/or cardiac muscle specificity comprise a P-motif, an RGD motif, or both.

[0170] In some embodiments, n-mer inserts that are or include an RGD insert and/or P-motif is included in a CNS-muscle or muscle specific targeting moiety and can facilitate muscle or muscle and CNS targeting by the targeting moiety. As will be appreciated in view of the present disclosure, such targeting moieties with CNS and muscle targeting capabilities can be advantageous for use in compositions and formulations for treating CNS diseases with muscle cell (such as cardiac and/or skeletal muscle) involvement or pathologies. In some exemplary embodiments and as further discussed herein the targeting moiety can be a viral capsid such as an AAV viral capsid.

[0171] In some embodiments, the n-mer insert is not or does not include and RGD insert.

[0172] In some embodiments, the n-mer insert is not or does not include a P-motif.

[0173] In some embodiments, the n-mer insert, the RGD motif, and/or P-motif is immediately preceded by an AQ a DG in the targeting moeity, which can be part of the n-mer insert or part of another polypeptide into which the n-mer insert is incorporated, RGD motif, and/or P-motif is inserted, such as a vector (e.g., an AAV vector), or viral protein (e.g., viral capsid polypeptide). In some embodiments, the AQ or DG is incorporated in the n-mer insert preceding the RGD and/or P motif and replaces one or two amino acids of the polypeptide into which the n-mer insert is incorporated. In some embodiments, where an n-mer insert is a P motif having the sequence amino acid sequence XₘPX₁QGTX₂RXₙ (SEQ ID NO: 1699), and Xₘ in the P motif is not 0 (i.e., m=1, 2 or 3) the amino acids of Xₘ can replace up to 1, 2, or 3, respectively amino acids of the polypeptide into which the n-mer insert is being incorporated. Likewise, in some embodiments where an n-mer insert is an RGD motif having the sequence XₘRGDXₙ and n is not 0 (i.e., n=1, 2, 3 or 4), the amino acids of X. can replace up to 1, 2, 3, or 4, respectively, amino acids of the polypeptide into which the n-mer insert is being incorporated. In some embodiments, the polypeptide into which such an n-mer insert is being incorporated is a viral polypeptide, such as a viral capsid polypeptide (e.g., an AAV capsid polypeptide). Incorporation of an n-mer insert in this manner can position an RGD motif and/or P motif as an “insertion” between any two desired contiguous amino acids of the recipient polypeptide.

[0174] In some embodiments, X₁ of the P-motif is S, T, or A. In some embodiments, X₂ of the P-motif L, V, F, or I. In some embodiments, Xₙ of the P-motif is 0. In some embodiments, Xₙ of the P-motif is 1. In some embodiments, Xₙ of the P-motif is 2. In some embodiments, Xₙ of the P-motif is 3. In some embodiments, Xₙ of the P-motif is 4. In some embodiments, Xₙ of the P-motif is 5. In some embodiments, Xₙ of the P-motif is 6. In some embodiments, Xₙ of the P-motif is 7. In some embodiments, Xₘ of the P-motif is 0. In some embodiments, Xₘ of the P motif is 3. In some embodiments, Xₘ of the P motif is 2. In some embodiments, Xₘ of the P motif is 1.

[0175] In some embodiments, an n-mer insert having both muscle and CNS specificity (“CNS muscle-specificity”) is in any one or more of Tables 8-11. In some embodiments, a muscle specific n-mer insert is in any one or more of Tables 4-7. In some embodiments, a cardiac muscle specific n-mer insert is in any one or more of Tables 6 and/or 7. In some embodiments, a skeletal muscle specific n-mer insert is in any one or more of Tables 4 and/or 5. In some embodiments, a skeletal muscle specific n-mer insert is in any one or more of Tables 4 and/or 5. In some embodiments, a cardiac muscle specific n-mer insert is in any one or more of Tables 7 and/or 8.

[0176] In some embodiments, the CNS-muscle specific or muscle specific n-mer insert, RGD-motif, and/or P-motif is species specific. In other words, in some embodiments, the CNS-muscle specific or muscle specific n-mer insert and/or P-motif can facilitate CNS and muscle targeting or muscle targeting, respectively, in one species better than another species. In some embodiments the CNS-muscle specific or muscle n-mer insert is specific for primates. In some embodiments, the CNS-muscle specific or muscle n-mer insert is specific for human and/or non-human primates.

[0177] In some embodiments, the CNS-muscle specific or muscle n-mer insert is capable of targeting one or more cell and/or tissue types over others within the organism, such as the CNS and/or muscle types (e.g., cardiac, skeletal, or smooth). In some embodiments, the cardiac muscle specific n-mer insert is capable of targeting cardiac muscle cells over non-muscle cells and over skeletal and/or smooth muscle cells. In some embodiments, the cardiac muscle specific n-mer insert is capable of targeting skeletal muscle cells over non-muscle cells and over cardiac and/or smooth muscle cells. In some embodiments, the CNS-muscle specific n-mer insert is capable of targeting muscle and CNS cells over non-muscle and non-CNS cells. In some embodiments, the CNS-cardiac muscle specific n-mer insert is capable of targeting cardiac muscle and CNS cells over non-cardiac muscle and non-CNS cells. In some embodiments, the CNS-skeletal muscle specific n-mer insert is capable of targeting muscle and CNS cells over non-skeletal muscle and non-CNS cells.

[0178] In some embodiments, the targeting moiety can include more than one n-mer insert s, such as a CNS-muscle specific or muscle specific (e.g., a cardiac muscle specific or skeletal muscle specific) n-mer insert described herein. In some embodiments, the targeting moiety can include 1, 2, 3, 4, 5, 6, 7, 8, 9, 10 or more n-mer inserts. In some embodiments, all the n-motifs included in the targeting moiety can be the same. In some embodiments where more than one n-mer insert is included, at least two of the n-mer inserts are different from each other. In some embodiments where more than one n-mer insert is included, all the n-mer inserts are different from each other.

[0179] In some embodiments, the targeting moiety, e.g., the CNS-muscle specific or muscle specific targeting moiety, can be coupled to or otherwise associated with a cargo. In some embodiments, one or more muscle-specific targeting moieties described herein is directly attached to the cargo. In some embodiments, one or more muscle-specific targeting moieties described herein is indirectly coupled to the cargo, such as via a linker molecule. In some embodiments, one or more one or more muscle-specific targeting moieties described herein is coupled to associated with a polypeptide or other particle that is coupled to, attached to, encapsulates, and/or contains a cargo.

[0180] Exemplary particles include, without limitation, viral particles (e.g., viral capsids, which is inclusive of bacteriophage capsids), polysomes, liposomes, nanoparticles, microparticles, exosomes, micelles, and the like. The term “nanoparticle” as used herein includes a nanoscale deposit of a homogenous or heterogeneous material. Nanoparticles may be regular or irregular in shape and may be formed from a plurality of co-deposited particles that form a composite nanoscale particle. Nanoparticles may be generally spherical in shape or have a composite shape formed from a plurality of co-deposited generally spherical particles. Exemplary shapes for the nanoparticles include, but are not limited to, spherical, rod, elliptical, cylindrical, disc, and the like. In some embodiments, the nanoparticles have a substantially spherical shape.

[0181] As used herein, the term “specific” when used in relation to described an interaction between two moieties, refers to non-covalent physical association of a first and a second moiety wherein the association between the first and second moieties is at least 2 times as strong, at least 5 times as strong as, at least 10 times as strong as, at least 50 times as strong as, at least 100 times as strong as, or stronger than the association of either moiety with most or all other moieties present in the environment in which binding occurs. Binding of two or more entities may be considered specific if the equilibrium dissociation constant, Kd, is 10⁻³ M or less, 10⁻⁴ M or less, 10⁻⁵ M or less, 10⁻⁶ M or less, 10⁻⁷ M or less, 10⁻⁸ M or less, 10⁻⁹ M or less, 10⁻¹⁰ M or less, 10⁻¹¹ M or less, or 10⁻¹² M or less under the conditions employed, e.g., under physiological conditions such as those inside a cell or consistent with cell survival. In some embodiments, specific binding can be accomplished by a plurality of weaker interactions (e.g., a plurality of individual interactions, wherein each individual interaction is characterized by a Kd of greater than 10⁻³ M). In some embodiments, specific binding, which can be referred to as “molecular recognition,” is a saturable binding interaction between two entities that is dependent on complementary orientation of functional groups on each entity. Examples of specific interactions include primer-polynucleotide interaction, aptamer-aptamer target interactions, antibody-antigen interactions, avidin-biotin interactions, ligand-receptor interactions, metal-chelate interactions, hybridization between complementary nucleic acids, etc.

[0182] In some embodiments, in addition to the n-mer insert(s) the targeting moiety can include a polypeptide, a polynucleotide, a lipid, a polymer, a sugar, or a combination thereof.

[0183] In some embodiments, the targeting moiety is incorporated into a viral protein, such as a capsid protein, including but not limited to lentiviral, adenoviral, AAV, bacteriophage, retroviral proteins. In some embodiments, n-mer insert is located between two amino acids of the viral protein such that the n-mer insert is external (i.e., is presented on the surface of) to a viral capsid.

[0184] In some embodiments, the composition containing one or more of the muscle-specific targeting moieties described herein has increased muscle cell potency, muscle cell specificity, increased muscle cell tropism and/or transduction efficiency, reduced immunogenicity, or any combination thereof.

[0185] In some embodiments, the composition containing one or more of the CNS-muscle-specific targeting moieties described herein has increased muscle and CNS cell potency, CNS and muscle cell specificity, increased CNS and muscle cell tropism and/or transduction efficiency, reduced immunogenicity, or any combination thereof.

[0186] Cargos can include any molecule that is capable of being coupled to or associated with the muscle-specific targeting moieties described herein. Cargos can include, without limitation, nucleotides, oligonucleotides, polynucleotides, amino acids, peptides, polypeptides, riboproteins, lipids, sugars, pharmaceutically active agents (e.g., drugs, imaging and other diagnostic agents, and the like), chemical compounds, and combinations thereof. In some embodiments, the cargo is DNA, RNA, amino acids, peptides, polypeptides, antibodies, aptamers, ribozymes, guide sequences for ribozymes that inhibit translation or transcription of essential tumor proteins and genes, hormones, immunomodulators, antipyretics, anxiolytics, antipsychotics, analgesics, antispasmodics, anti-inflammatories, anti-histamines, anti-infectives, radiation sensitizers, chemotherapeutics, radioactive compounds, imaging agents, and combinations thereof.

[0187] The CNS-specific n-mer inserts and targeting moieties can be encoded in whole or in part by a polynucleotide. The encoding polynucleotides can be included in one or more vectors (or vector systems) that can be used to generate targeting moieties and compositions thereof that include the CNS-muscle specific and/or muscle specific n-mer insert(s) described herein. Exemplary encoding polynucleotides, vectors, vector systems, and recombinant engineering techniques are described in greater detail herein and/or are generally known in the art and can be adapted for use with the targeting moieties and compositions thereof described herein.

[0188] In some embodiments, the cargo is capable of treating or preventing a CNS and/or muscle disease or disorder. Exemplary CNS and muscle diseases and disorders are described elsewhere herein.

### Cargos

[0189] Representative cargo molecules that may be delivered using the compositions disclosed herein include, but are not limited to, nucleic acids, polynucleotides, proteins, polypeptides, polynucleotide/polypeptide complexes, small molecules, sugars, or a combination thereof. Cargos that can be delivered in accordance with the systems and methods described herein include, but are not necessarily limited to, biologically active agents, including, but not limited to, therapeutic agents, imaging agents, and monitoring agents. A cargo may be an exogenous material or an endogenous material. In some embodiments, the cargo can be a “gene of interest”.

### Polynucleotides

[0190] In some embodiments, the cargo is a cargo polynucleotide. As used herein, “nucleic acid,” “nucleotide sequence,” and “polynucleotide” can be used interchangeably herein and can generally refer to a string of at least two base-sugar-phosphate combinations and refers to, among others, single- and double-stranded DNA, DNA that is a mixture of single- and double-stranded regions, single- and double-stranded RNA, and RNA that is mixture of single- and double-stranded regions, hybrid molecules comprising DNA and RNA that may be single-stranded or, more typically, double-stranded or a mixture of single- and double-stranded regions. In addition, polynucleotide as used herein can refer to triple-stranded regions comprising RNA or DNA or both RNA and DNA. The strands in such regions can be from the same molecule or from different molecules. The regions may include all of one or more of the molecules, but more typically involve only a region of some of the molecules. One of the molecules of a triple-helical region often is an oligonucleotide. “Polynucleotide” and “nucleic acids” also encompasses such chemically, enzymatically, or metabolically modified forms of polynucleotides, as well as the chemical forms of DNA and RNA characteristic of viruses and cells, including simple and complex cells, inter alia. For instance, the term polynucleotide as used herein can include DNAs or RNAs as described herein that contain one or more modified bases. Thus, DNAs or RNAs including unusual bases, such as inosine, or modified bases, such as tritylated bases, to name just two examples, are polynucleotides as the term is used herein. “Polynucleotide”, “nucleotide sequences” and “nucleic acids” also includes PNAs (peptide nucleic acids), phosphorothioates, and other variants of the phosphate backbone of native nucleic acids. Natural nucleic acids have a phosphate backbone, artificial nucleic acids can contain other types of backbones, but contain the same bases. Thus, DNAs or RNAs with backbones modified for stability or for other reasons are “nucleic acids” or “polynucleotides” as that term is intended herein. As used herein, “nucleic acid sequence” and “oligonucleotide” also encompasses a nucleic acid and polynucleotide as defined elsewhere herein.

[0191] As used herein, “deoxyribonucleic acid (DNA)” and “ribonucleic acid (RNA)” can generally refer to any polyribonucleotide or polydeoxyribonucleotide, which may be unmodified RNA or DNA or modified RNA or DNA. RNA can be in the form of non-coding RNA, including but not limited to, tRNA (transfer RNA), snRNA (small nuclear RNA), rRNA (ribosomal RNA), anti-sense RNA, RNAi (RNA interference construct), siRNA (short interfering RNA), microRNA (miRNA), or ribozymes, aptamers, guide RNA (gRNA), or coding mRNA (messenger RNA).

[0192] In some embodiments, the cargo polynucleotide is DNA. In some embodiments, the cargo polynucleotide is RNA. In some embodiments, the cargo polynucleotide is a polynucleotide (a DNA or an RNA) that encodes an RNA and/or a polypeptide. As used herein with reference to the relationship between DNA, cDNA, cRNA, RNA, protein/peptides, and the like “corresponding to” or “encoding” (used interchangeably herein) refers to the underlying biological relationship between these different molecules. As such, one of skill in the art would understand that operatively “corresponding to” can direct them to determine the possible underlying and/or resulting sequences of other molecules given the sequence of any other molecule which has a similar biological relationship with these molecules. For example, from a DNA sequence an RNA sequence can be determined and from an RNA sequence a cDNA sequence can be determined.

### Genes of Interest

[0193] In some embodiments, the systems described herein comprise a polynucleotide encoding a gene of interest. As used herein, the term “gene of interest” refers to the gene selected for a particular purpose and being desired of delivery by a system or vesicle of the present invention. A gene of interest inserted into one or more regions a vector, such as an expression vector (including one or more of the engineered delivery vesicle generation system vectors) such that when expressed in a target cell or recipient cell it can be expressed and produce a desired gene product and/or be packaged as cargo in an engineered delivery vesicle of the present invention. It will be appreciated that other cargos specifically identified can also be genes of interest. For example, a polynucleotide encoding a Cas effector can be a gene of interest in this context where it is desired to deliver a Cas effector to a cell, for example.

[0194] In one embodiment, the gene of interest encodes a gene that provides a therapeutic function for the treatment of a disease. In some embodiments, the gene of interest can also be a vaccinating gene, that is to say a gene encoding an antigenic peptide that is capable of generating an immune response in humans or animals. This may include, but is not necessarily limited to, peptide antigens specific for viral and bacterial infections, or may be tumor-specific. In some embodiments, a gene of interest is a gene which confers a desired phenotype. As the embodiments described herein focus on improved methods for packaging and delivery of a gene of interest, the particular gene of interest is not limiting, and the technology can generally be used to deliver any gene of interest generally recognized by one of ordinary skill in the art as deliverable using a lentiviral system. One skilled in the art can design a construct containing any gene that they are interested in. Designing a construct containing a known gene of interest can be performed without undue experimentation. One of ordinary skill in the art routinely selects genes of interest. For example, the GenBank public database has existed since 1982 and is routinely used by persons of ordinary skill in the art relevant to the presently claimed method. As of June 2019, GenBank contains 2013,383,758 loci, 329,835,282, 370 bases, from 213,383,758 reported sequences. The nucleotide sequences are from more than 300,000 organisms with supporting bibliographic and biological annotation. GenBank is only example, as there are many other known repositories of sequence information.

[0195] In some embodiments, the gene of interest may be, for example, a synthetic RNA/DNA sequence, a codon optimized RNA/DNA sequence, a recombinant RNA/DNA sequence (i.e., prepared by use of recombinant DNA techniques), a cDNA sequence or a partial genomic DNA sequence, including combinations thereof. Preferably, this is in the sense orientation. Preferably, the sequence is, comprises, or is transcribed from cDNA. The gene(s) of interest may also be referred to herein as “heterologous sequence(s)” “heterologous gene(s)” or “transgene(s)”.

[0196] In some embodiments, the gene of interest may confer some therapeutic benefit. The terms “therapeutic agent”, “therapeutic capable agent” or “treatment agent” are used interchangeably and refer to a molecule or compound that confers some beneficial effect upon administration to a subject. The beneficial effect includes enablement of diagnostic determinations; amelioration of a disease, symptom, disorder, or pathological condition; reducing or preventing the onset of a disease, symptom, disorder, or condition; and generally counteracting a disease, symptom, disorder or pathological condition.

[0197] Preferably, the therapeutic agent may be administered in a therapeutically effective amount of the active components. The term “therapeutically effective amount” refers to an amount which can elicit a biological or medicinal response in a tissue, system, animal, or human that is being sought by a researcher, veterinarian, medical doctor or other clinician, and in particular can prevent or alleviate one or more of the local or systemic symptoms or features of a disease or condition being treated. In some embodiments, the disease or condition is a disease or condition of or affecting the CNS or cell thereof. Exemplary diseases and disorders of and/or affecting the CNS are described in greater detail elsewhere herein.

[0198] In some embodiments, the gene of interest may lead to altered expression in the target cell. As used herein the term “altered expression” may particularly denote altered production of the recited gene products by a cell. As used herein, the term “gene product(s)” includes RNA transcribed from a gene (e.g., mRNA), or a polypeptide encoded by a gene or translated from RNA.

[0199] Also, “altered expression” as intended herein may encompass modulating the activity of one or more endogenous gene products. Accordingly, “altered expression”, “altering expression”, “modulating expression”, or “detecting expression” or similar may be used interchangeably with respectively “altered expression or activity”, “altering expression or activity”, “modulating expression or activity”, or “detecting expression or activity” or similar. As used herein, “modulating” or “to modulate” generally means either reducing or inhibiting the activity of a target or antigen, or alternatively increasing the activity of the target or antigen, as measured using a suitable in vitro, cellular, or in vivo assay. In particular, “modulating” or “to modulate” can mean either reducing or inhibiting the (relevant or intended) activity of, or alternatively increasing the (relevant or intended) biological activity of the target or antigen, as measured using a suitable in vitro, cellular or in vivo assay (which will usually depend on the target or antigen involved), by at least 5%, at least 10%, at least 25%, at least 50%, at least 60%, at least 70%, at least 80%, or 90% or more, compared to activity of the target or antigen in the same assay under the same conditions but without the presence of the inhibitor/antagonist agents or activator/agonist agents described herein.

[0200] As will be clear to the skilled person, “modulating” can also involve effecting a change (which can either be an increase or a decrease) in affinity, avidity, specificity and/or selectivity of a target or antigen, for one or more of its targets compared to the same conditions but without the presence of a modulating agent. Again, this can be determined in any suitable manner and/or using any suitable assay known per se, depending on the target. In particular, an action as an inhibitor/antagonist or activator/agonist can be such that an intended biological or physiological activity is increased or decreased, respectively, by at least 5%, at least 10%, at least 25%, at least 50%, at least 60%, at least 70%, at least 80%, or 90% or more, compared to the biological or physiological activity in the same assay under the same conditions but without the presence of the inhibitor/antagonist agent or activator/agonist agent. Modulating can also involve activating the target or antigen or the mechanism or pathway in which it is involved.

### Interference RNAs

[0201] In certain example embodiments, the one or more polynucleotides may encode one or more interference RNAs. Iinterference RNAs are RNA molecules capable of suppressing gene expressions. Example types of interference RNAs include small interfering RNA (siRNA), micro RNA (miRNA), and short hairpin RNA (shRNA).

[0202] In certain example embodiments, the interference RNA may be a siRNAs. Small interfering RNA (siRNA) molecules are capable of inhibiting target gene expression by interfering RNA. siRNAs may be chemically synthesized, or may be obtained by in vitro transcription, or may be synthesized in vivo in target cell. siRNAs may comprise double-stranded RNA from 15 to 40 nucleotides in length and can contain a protuberant region 3′ and/or 5′ from 1 to 6 nucleotides in length. Length of protuberant region is independent from total length of siRNA molecule. siRNAs may act by post-transcriptional degradation or silencing of target messenger. In some cases, the exogenous polynucleotides encode shRNAs. In shRNAs the antiparallel strands that form siRNA are connected by a loop or hairpin region.

[0203] The interference RNA (e.g., siRNA) may suppress expression of genes to promote long term survival and functionality of cells after transplanted to a subject. In some examples, the interference RNAs suppress genes in TGFβ pathway, e.g., TGFβ, TGFβ receptors, and SMAD proteins. In some examples, the interference RNAs suppress genes in colony-stimulating factor 1 (CSF1) pathway, e.g., CSF1 and CSF1 receptors. In certain embodiments, the one or more interference RNAs suppress genes in both the CSF1 pathway and the TGFβ pathway. TGFβ pathway genes may comprise one or more of ACVR1, ACVR1C, ACVR2A, ACVR2B, ACVRL1, AMH, AMHR2, BMP2, BMP4, BMP5, BMP6, BMP7, BMP8A, BMP8B, BMPR1A, BMPR1B, BMPR2, CDKN2B, CHRD, COMP, CREBBP, CUL1, DCN, E2F4, E2F5, EP300, FST, GDF5, GDF6, GDF7, ID1, ID2, ID3, ID4, IFNG, INHBA, INHBB, INHBC, INHBE, LEFTY1, LEFTY2, LOC728622, LTBP1, MAPK1, MAPK3, MYC, NODAL, NOG, PITX2, PPP2CA, PPP2CB, PPP2R1A, PPP2R1B, RBL1, RBL2, RBX1, RHOA, ROCK1, ROCK2, RPS6KB1, RPS6KB2, SKP1, SMAD1, SMAD2, SMAD3, SMAD4, SMAD5, SMAD6, SMAD7, SMAD9, SMURF1, SMURF2, SP1, TFDP1, TGFB1, TGFB2, TGFB3, TGFBR1, TGFBR2, THBS1, THBS2, THBS3, THBS4, TNF, ZFYVE16, and/or ZFYVE9.

[0204] In some embodiments, the cargo polynucleotide is an RNAi molecule, antisense molecule, and/or a gene silencing oligonucleotide or a polynucleotide that encodes an RNAi molecule, antisense molecule, and/or gene silencing oligonucleotide.

[0205] As used herein, “gene silencing oligonucleotide” refers to any oligonucleotide that can alone or with other gene silencing oligonucleotides utilize a cell's endogenous mechanisms, molecules, proteins, enzymes, and/or other cell machinery or exogenous molecule, agent, protein, enzyme, and/or polynucleotide to cause a global or specific reduction or elimination in gene expression, RNA level(s), RNA translation, RNA transcription, that can lead to a reduction or effective loss of a protein expression and/or function of a non-coding RNA as compared to wild-type or a suitable control. This is synonymous with the phrase “gene knockdown” Reduction in gene expression, RNA level(s), RNA translation, RNA transcription, and/or protein expression can range from about 100, 99, 98, 97, 96, 95, 94, 93, 92, 91, 90, 89, 88, 87, 86, 85, 84, 83, 82, 81, 80, 79, 78, 77, 76, 75, 74, 73, 72, 71, 70, 69, 68, 67, 66, 65, 64, 63, 62, 61, 60, 59, 58, 57, 56, 55, 54, 53, 52, 51, 50, 49, 48, 47, 46, 45, 44, 43, 42 41, 40, 39, 38, 37, 36, 35, 34, 33, 32, 31, 30, 29, 28, 27, 26, 25, 24, 23, 22, 21, 20, 19, 18, 17, 16, 15, 14, 13, 12, 11, 10, 9, 8, 7, 6, 5, 4, 3, 2, to 1% or less reduction. “Gene silencing oligonucleotides” include, but are not limited to, any antisense oligonucleotide, ribozyme, any oligonucleotide (single or double stranded) used to stimulate the RNA interference (RNAi) pathway in a cell (collectively RNAi oligonucleotides), small interfering RNA (siRNA), microRNA, and short-hairpin RNA (shRNA). Commercially available programs and tools are available to design the nucleotide sequence of gene silencing oligonucleotides for a desired gene, based on the gene sequence and other information available to one of ordinary skill in the art.

### Therapeutic Polynucleotides

[0206] In some embodiments, the cargo molecule is a therapeutic polynucleotide. Therapeutic polynucleotides are those that provide a therapeutic effect when delivered to a recipient cell. The polynucleotide can be a toxic polynucleotide (a polynucleotide that when transcribed or translated results in the death of the cell) or polynucleotide that encodes a lytic peptide or protein. In embodiments, delivery vesicles having a toxic polynucleotide as a cargo molecule can act as an antimicrobial or antibiotic. This is discussed in greater detail elsewhere herein. In some embodiments, the cargo molecule can be exogenous to the producer cell and/or a first cell. In some embodiments, the cargo molecule can be endogenous to the producer cell and/or a first cell. In some embodiments, the cargo molecule can be exogenous to the recipient cell and/or a second cell. In some embodiments, the cargo molecule can be endogenous to the recipient cell and/or second cell.

[0207] As described herein the cargo polynucleotide can be any polynucleotide endogenous or exogenous to the eukaryotic cell. For example, the cargo polynucleotide can be a polynucleotide residing in the nucleus of the eukaryotic cell. The cargo polynucleotide can be a sequence coding a gene product (e.g., a protein) or a non-coding sequence (e.g., a regulatory polynucleotide).

[0208] In some embodiments, the cargo polynucleotide is a DNA or RNA (e.g., a mRNA) vaccine.

### Aptamers

[0209] In certain example embodiments, the polynucleotide may be an aptamer. In certain embodiments, the one or more agents is an aptamer. Nucleic acid aptamers are nucleic acid species that have been engineered through repeated rounds of in vitro selection or equivalently, SELEX (systematic evolution of ligands by exponential enrichment) to bind to various molecular targets such as small molecules, proteins, nucleic acids, cells, tissues, and organisms. Nucleic acid aptamers have specific binding affinity to molecules through interactions other than classic Watson-Crick base pairing. Aptamers are useful in biotechnological and therapeutic applications as they offer molecular recognition properties similar to antibodies. In addition to their discriminate recognition, aptamers offer advantages over antibodies as they can be engineered completely in a test tube, are readily produced by chemical synthesis, possess desirable storage properties, and elicit little or no immunogenicity in therapeutic applications. In certain embodiments, RNA aptamers may be expressed from a DNA construct. In other embodiments, a nucleic acid aptamer may be linked to another polynucleotide sequence. The polynucleotide sequence may be a double stranded DNA polynucleotide sequence. The aptamer may be covalently linked to one strand of the polynucleotide sequence. The aptamer may be ligated to the polynucleotide sequence. The polynucleotide sequence may be configured, such that the polynucleotide sequence may be linked to a solid support or ligated to another polynucleotide sequence.

[0210] Aptamers, like peptides generated by phage display or monoclonal antibodies (“mAbs”), are capable of specifically binding to selected targets and modulating the target's activity, e.g., through binding, aptamers may block their target's ability to function. A typical aptamer is 10-15 kDa in size (30-45 nucleotides), binds its target with sub-nanomolar affinity, and discriminates against closely related targets (e.g., aptamers will typically not bind other proteins from the same gene family). Structural studies have shown that aptamers are capable of using the same types of binding interactions (e.g., hydrogen bonding, electrostatic complementarity, hydrophobic contacts, steric exclusion) that drives affinity and specificity in antibody-antigen complexes.

[0211] Aptamers have a number of desirable characteristics for use in research and as therapeutics and diagnostics including high specificity and affinity, biological efficacy, and excellent pharmacokinetic properties. In addition, they offer specific competitive advantages over antibodies and other protein biologics. Aptamers are chemically synthesized and are readily scaled as needed to meet production demand for research, diagnostic or therapeutic applications. Aptamers are chemically robust. They are intrinsically adapted to regain activity following exposure to factors such as heat and denaturants and can be stored for extended periods (>1 yr) at room temperature as lyophilized powders. Not being bound by a theory, aptamers bound to a solid support or beads may be stored for extended periods.

[0212] Oligonucleotides in their phosphodiester form may be quickly degraded by intracellular and extracellular enzymes such as endonucleases and exonucleases. Aptamers can include modified nucleotides conferring improved characteristics on the ligand, such as improved in vivo stability or improved delivery characteristics. Examples of such modifications include chemical substitutions at the ribose and/or phosphate and/or base positions. SELEX identified nucleic acid ligands containing modified nucleotides are described, e.g., in U.S. Pat. No. 5,660,985, which describes oligonucleotides containing nucleotide derivatives chemically modified at the 2′ position of ribose, 5 position of pyrimidines, and 8 position of purines, U.S. Pat. No. 5,756,703 which describes oligonucleotides containing various 2′-modified pyrimidines, and U.S. Pat. No. 5,580,737 which describes highly specific nucleic acid ligands containing one or more nucleotides modified with 2′-amino (2′-NH2), 2′-fluoro (2′-F), and/or 2′-O-methyl (2′-OMe) substituents. Modifications of aptamers may also include modifications at exocyclic amines, substitution of 4-thiouridine, substitution of 5-bromo or 5-iodo-uracil; backbone modifications, phosphorothioate or allyl phosphate modifications, methylations, and unusual base-pairing combinations such as the isobases isocytidine and isoguanosine. Modifications can also include 3′ and 5′ modifications such as capping. As used herein, the term phosphorothioate encompasses one or more non-bridging oxygen atoms in a phosphodiester bond replaced by one or more sulfur atoms. In further embodiments, the oligonucleotides comprise modified sugar groups, for example, one or more of the hydroxyl groups is replaced with halogen, aliphatic groups, or functionalized as ethers or amines. In one embodiment, the 2′-position of the furanose residue is substituted by any of an O-methyl, O-alkyl, 0-allyl, S-alkyl, S-allyl, or halo group. Methods of synthesis of 2′-modified sugars are described, e.g., in Sproat, et al., Nucl. Acid Res. 19:733-738 (1991); Cotten, et al, Nucl. Acid Res. 19:2629-2635 (1991); and Hobbs, et al, Biochemistry 12:5138-5145 (1973). Other modifications are known to one of ordinary skill in the art. In certain embodiments, aptamers include aptamers with improved off-rates as described in International Patent Publication No. WO 2009012418, “Method for generating aptamers with improved off-rates,” incorporated herein by reference in its entirety. In certain embodiments aptamers are chosen from a library of aptamers. Such libraries include, but are not limited to, those described in Rohloff et al., “Nucleic Acid Ligands With Protein-like Side Chains: Modified Aptamers and Their Use as Diagnostic and Therapeutic Agents,” Molecular Therapy Nucleic Acids (2014) 3, e201. Aptamers are also commercially available (see e.g., SomaLogic, Inc., Boulder, Colorado). In certain embodiments, the present invention may utilize any aptamer containing any modification as described herein.

[0213] In certain other example embodiments, the polynucleotide may be a ribozyme or other enzymatically active polynucleotide.

### Biologically Active Agents

[0214] In some embodiments, the cargo is a biologically active agent. Biologically active agents include any molecule that induces, directly or indirectly, an effect in a cell. Biologically active agents may be a protein, a nucleic acid, a small molecule, a carbohydrate, and a lipid. When the cargo is or comprises a nucleic acid, the nucleic acid may be a separate entity from the DNA-based carrier. In these embodiments, the DNA-based carrier is not itself the cargo. In other embodiments, the DNA-based carrier may itself comprise a nucleic acid cargo. Therapeutic agents include, without limitation, chemotherapeutic agents, anti-oncogenic agents, anti-angiogenic agents, tumor suppressor agents, anti-microbial agents, enzyme replacement agents, gene expression modulating agents and expression constructs comprising a nucleic acid encoding a therapeutic protein or nucleic acid, and vaccines. Therapeutic agents may be peptides, proteins (including enzymes, antibodies and peptidic hormones), ligands of cytoskeleton, nucleic acid, small molecules, non-peptidic hormones and the like. To increase affinity for the nucleus, agents may be conjugated to a nuclear localization sequence. Nucleic acids that may be delivered by the method of the invention include synthetic and natural nucleic acid material, including DNA, RNA, transposon DNA, antisense nucleic acids, dsRNA, siRNAs, transcription RNA, messenger RNA, ribosomal RNA, small nucleolar RNA, microRNA, ribozymes, plasmids, expression constructs, etc.

[0215] Imaging agents include contrast agents, such as ferrofluid-based MRI contrast agents and gadolinium agents for PET scans, fluorescein isothiocyanate and 6-TAMARA. Monitoring agents include reporter probes, biosensors, green fluorescent protein, and the like. Reporter probes include photo-emitting compounds, such as phosphors, radioactive moieties, and fluorescent moieties, such as rare earth chelates (e.g., europium chelates), Texas Red, rhodamine, fluorescein, FITC, fluo-3, 5 hexadecanoyl fluorescein, Cy2, fluor X, Cy3, Cy3.5, Cy5, Cy5.5, Cy7, dansyl, phycocrytherin, phycocyanin, spectrum orange, spectrum green, and/or derivatives of any one or more of the above. Biosensors are molecules that detect and transmit information regarding a physiological change or process, for instance, by detecting the presence or change in the presence of a chemical. The information obtained by the biosensor typically activates a signal that is detected with a transducer. The transducer typically converts the biological response into an electrical signal. Examples of biosensors include enzymes, antibodies, DNA, receptors, and regulator proteins used as recognition elements, which can be used either in whole cells or isolated and used independently (D'Souza, 2001, Biosensors and Bioelectronics 16:337-353).

[0216] One or two or more different cargoes may be delivered by the delivery particles described herein.

[0217] In some embodiments, the cargo may be linked to one or more envelope proteins by a linker, as described elsewhere herein. A suitable linker may include, but is not necessarily limited to, a glycine-serine linker. In some embodiments, the glycine-serine linker is (GGS)₃.

[0218] In some embodiments, the cargo comprises a ribonucleoprotein. In specific embodiments, the cargo comprises a genetic modulating agent.

[0219] As used herein the term “altered expression” may particularly denote altered production of the recited gene products by a cell. As used herein, the term “gene product(s)” includes RNA transcribed from a gene (e.g., mRNA), or a polypeptide encoded by a gene or translated from RNA.

### Genetic Modifying Systems

[0220] In some embodiments, the cargo is a polynucleotide encoding a gene modifying system. Gene modifying systems may include, but are not limited to, zinc finger nucleases, TALE nucleases (TALENs), meganucleases, RNAi, and CRISPR-Cas systems.

### CRISPR-Cas Systems

[0221] The CRISPR-Cas system may include a Class 1 comprising a Type I, Type III or Type IV Cas proteins as described in Makarova et al. “Evolutionary classification of CRISPR-Cas systems: a burst of class 2 and derived variants” Nature Reviews Microbiology, 18:67-81 (February 2020), and incorporated in its entirety herein by reference, and particularly as described in FIG. 1, p. 326. polynucleotide modifying system or component(s) thereof. The CRISPR-Cas system may also be a Class 2 CRISPR-Cas system such as a Type II, Type V, or Type VI system, which are described in Makarova et al. “Evolutionary classification of CRISPR-Cas systems: a burst of class 2 and derived variants” Nature Reviews Microbiology, 18:67-81 (February 2020), incorporated herein by reference.

[0222] CRISPR-Cas systems may also include further modified systems where the Cas protein is rendered catalytically inactive and fused to other functional domains or polypeptides to derive new functions. Example modified systems include base editor, primer editors, and CRISPR-associated transposase (CAST) systems.

[0223] Example base editing systems include DNA base editors (Komor et al. 2016 Nature. 533:420-424; Nishida et a. 2016. Science 353; Gaudelli et al. 2017 Nature 551:464-471; Mok et al., Cell. 182, 463-480 (2020); Koblan et al., Nature 589, 608-614 (2021); Rees and Liu. 2018. 19(12):770-788. doi: 10.1038/s41576-018-0059-1; Song et al., Nat Biomed Eng. 2020 January; 4(1):125-130. doi: 10.1038/s41551-019-0357-8; Koblan et al. 2018. 6(9):843-846. doi: 10.1038/nbt.4172; Thuronyi et al., Nat Biotechnol. 2019 September; 37(9):1070-1079. doi: 10.1038/s41587-019-0193-0; Doman et al., Nat Biotechnol. 2020 May; 38(5):620-628. doi: 10.1038/s41587-020-0414-6; Richter et al., Nat Biotechnol. 2020 July; 38(7):883-891. doi: 10.1038/s41587-020-0453-z; Huang et al., Nat Protoc. 2021 February; 16(2):1089-1128. doi: 10.1038/s41596-020-00450-9; Koblan et al., Nat Biotechnol. 2021 Jun. 28. doi: 10.1038/s41587-021-00938-z; WO 2018/213708, WO 2018/213726, WO/2019/126709, WO/2019/1267; WO/2019/126762) and RNA base editors (Cox et al. 2017. Science 358:1019-1027, Rees and Liu. 2018. 19(12):770-788. doi: 10.1038/s41576-018-0059-1; Abudayyeh 00, et al., A cytosine deaminase for programmable single-base RNA editing, Science 26 Jul. 2019; WO 2019/005883, WO 2019/005886, WO 2019/071048, PCT/US2018/0579, PCT US/2018/067207).

[0224] Example prime editing systems include those as described in Anzalone et al. 2019 Nature 576:149-157; Gao et al. 2021 Genome Biol. 22:83; Jang et al. 2021 Nature Biomed. Eng. doi.org/10.1038/s41551-021-00788-9; WO 2021/072328; WO 2020/191248; WO 2020/191249; WO 2020/191239; WO 2020/191245; WO 2020/191246; WO 2020/191241; WO 2020/191171; WO 202/191153; WO 2020/191242; WO 2020/191233; WO 2020/191243; and WO 2020/191234.

[0225] Example CAST systems include those as described in Klompe et al. 2019 Nature 571(7764):219-225; Strecker et al. 2019 Science 365:48-53; and Saito et al. 2021 Cell 184:2441-2453; WO 2020/131862; WO 2019090173; WO 2019090174; WO 2019090175, and WO 2019/241452.

[0226] Example non-LTR retrotransposon systems include those as described in WO2021/102042.

[0227] Example Cas-associated ligase systems include those as described in WO2021/133977.

[0228] For modified CRISPR-Cas system that exceed the cargo capacity for a delivery vehicle incorporating the targeting moieties disclosed herein, a split-intein approach to divide CBE and ABE into reconstitutable halves, is described in Levy et al. Nature Biomedical Engineering doi.org/10.1038/s41441-019-0505-5 (2019), which is incorporated herein by reference.

### Zinc Finger Nucleases

[0229] Zinc Finger proteins can comprise a functional domain. The first synthetic zinc finger nucleases (ZFNs) were developed by fusing a ZF protein to the catalytic domain of the Type IIS restriction enzyme FokI. (Kim, Y. G. et al., 1994, Chimeric restriction endonuclease, Proc. Natl. Acad. Sci. U.S.A. 91, 883-887; Kim, Y. G. et al., 1996, Hybrid restriction enzymes: zinc finger fusions to Fok I cleavage domain. Proc. Natl. Acad. Sci. U.S.A. 93, 1156-1160). Increased cleavage specificity can be attained with decreased off target activity by use of paired ZFN heterodimers, each targeting different nucleotide sequences separated by a short spacer. (Doyon, Y. et al., 2011, Enhancing zinc-finger-nuclease activity with improved obligate heterodimeric architectures. Nat. Methods 8, 74-79). ZFPs can also be designed as transcription activators and repressors and have been used to target many genes in a wide variety of organisms. Exemplary methods of genome editing using ZFNs can be found for example in U.S. Pat. Nos. 6,534,261, 6,607,882, 6,746,838, 6,794,136, 6,824,978, 6,866,997, 6,933,113, 6,979,539, 7,013,219, 7,030,215, 7,220,719, 7,241,573, 7,241,574, 7,585,849, 7,595,376, 6,903,185, and 6,479,626, all of which are specifically incorporated by reference.

### Meganucleases

[0230] In some embodiments, a meganuclease or system thereof can be used to modify a polynucleotide. Meganucleases, which are endodeoxyribonucleases characterized by a large recognition site (double-stranded DNA sequences of 12 to 40 base pairs). Exemplary methods for using meganucleases can be found in U.S. Pat. Nos. 8,163,514, 8,133,697, 8,021,867, 8,119,361, 8,119,381, 8,124,369, and 8,129,134, which are specifically incorporated herein by reference.

### RNAi

[0231] In certain embodiments, the genetic modifying agent is RNAi (e.g., shRNA). As used herein, “gene silencing” or “gene silenced” in reference to an activity of an RNAi molecule, for example a siRNA or miRNA refers to a decrease in the mRNA level in a cell for a target gene by at least about 5%, about 10%, about 20%, about 30%, about 40%, about 50%, about 60%, about 70%, about 80%, about 90%, about 95%, about 99%, about 100% of the mRNA level found in the cell without the presence of the miRNA or RNA interference molecule. In one preferred embodiment, the mRNA levels are decreased by at least about 70%, about 80%, about 90%, about 95%, about 99%, about 100%.

[0232] As used herein, the term “RNAi” refers to any type of interfering RNA, including but not limited to, siRNAi, shRNAi, endogenous microRNA and artificial microRNA. For instance, it includes sequences previously identified as siRNA, regardless of the mechanism of down-stream processing of the RNA (i.e., although siRNAs are believed to have a specific method of in vivo processing resulting in the cleavage of mRNA, such sequences can be incorporated into the vectors in the context of the flanking sequences described herein). The term “RNAi” can include both gene silencing RNAi molecules, and also RNAi effector molecules which activate the expression of a gene.

[0233] As used herein, a “siRNA” refers to a nucleic acid that forms a double stranded RNA, which double stranded RNA has the ability to reduce or inhibit expression of a gene or target gene when the siRNA is present or expressed in the same cell as the target gene. The double stranded RNA siRNA can be formed by the complementary strands. In one embodiment, a siRNA refers to a nucleic acid that can form a double stranded siRNA. The sequence of the siRNA can correspond to the full-length target gene, or a subsequence thereof. Typically, the siRNA is at least about 15-50 nucleotides in length (e.g., each complementary sequence of the double stranded siRNA is about 15-50 nucleotides in length, and the double stranded siRNA is about 15-50 base pairs in length, preferably about 19-30 base nucleotides, preferably about 20-25 nucleotides in length, e.g., 20, 21, 22, 23, 24, 25, 26, 27, 28, 29, or 30 nucleotides in length).

[0234] As used herein “shRNA” or “small hairpin RNA” (also called stem loop) is a type of siRNA. In one embodiment, these shRNAs are composed of a short, e.g., about 19 to about 25 nucleotide, antisense strand, followed by a nucleotide loop of about 5 to about 9 nucleotides, and the analogous sense strand. Alternatively, the sense strand can precede the nucleotide loop structure and the antisense strand can follow.

[0235] The terms “microRNA” or “miRNA” are used interchangeably herein are endogenous RNAs, some of which are known to regulate the expression of protein-coding genes at the posttranscriptional level. Endogenous microRNAs are small RNAs naturally present in the genome that are capable of modulating the productive utilization of mRNA. The term artificial microRNA includes any type of RNA sequence, other than endogenous microRNA, which is capable of modulating the productive utilization of mRNA. MicroRNA sequences have been described in publications such as Lim, et al., Genes & Development, 17, p. 991-1008 (2003), Lim et al Science 299, 1540 (2003), Lee and Ambros Science, 294, 862 (2001), Lau et al., Science 294, 858-861 (2001), Lagos-Quintana et al, Current Biology, 12, 735-739 (2002), Lagos Quintana et al, Science 294, 853-857 (2001), and Lagos-Quintana et al, RNA, 9, 175-179 (2003), which are incorporated herein by reference. Multiple microRNAs can also be incorporated into a precursor molecule. Furthermore, miRNA-like stem-loops can be expressed in cells as a vehicle to deliver artificial miRNAs and short interfering RNAs (siRNAs) for the purpose of modulating the expression of endogenous genes through the miRNA and or RNAi pathways.

[0236] As used herein, “double stranded RNA” or “dsRNA” refers to RNA molecules that are comprised of two strands. Double-stranded molecules include those comprised of a single RNA molecule that doubles back on itself to form a two-stranded structure. For example, the stem loop structure of the progenitor molecules from which the single-stranded miRNA is derived, called the pre-miRNA (Bartel et al. 2004. Cell 1 16:281-297), comprises a dsRNA molecule.

### Polypeptides

[0237] In certain example embodiments, the cargo molecule may one or more polypeptides. The polypeptide may be a full-length protein or a functional fragment or functional domain thereof, that is a fragment or domain that maintains the desired functionality of the full-length protein. As used within this section “protein” is meant to refer to full-length proteins and functional fragments and domains thereof. A wide array of polypeptides may be delivered using the engineered delivery vesicles described herein, including but not limited to, secretory proteins, immunomodulatory proteins, anti-fibrotic proteins, proteins that promote tissue regeneration and/or transplant survival functions, hormones, anti-microbial proteins, anti-fibrillating polypeptides, and antibodies. The one or more polypeptides may also comprise combinations of the aforementioned example classes of polypeptides. It will be appreciated that any of the polypeptides described herein can also be delivered via the engineered delivery vesicles and systems described herein via delivery of the corresponding encoding polynucleotide.

### Secretory Proteins

[0238] In certain example embodiments, the one or more polypeptides may comprise one or more secretory proteins. A secretory is a protein that is actively transported out of the cell, for example, the protein, whether it be endocrine or exocrine, is secreted by a cell. Secretory pathways have been shown conserved from yeast to mammals, and both conventional and unconventional protein secretion pathways have been demonstrated in plants. Chung et al., “An Overview of Protein Secretion in Plant Cells,” MIMB, 1662:19-32, Sep. 1, 2017. Accordingly, identification of secretory proteins in which one or more polynucleotides may be inserted can be identified for particular cells and applications. In embodiments, one of skill in the art can identify secretory proteins based on the presence of a signal peptide, which consists of a short hydrophobic N-terminal sequence.

[0239] In embodiments, the protein is secreted by the secretory pathway. In embodiments, the proteins are exocrine secretion proteins or peptides, comprising enzymes in the digestive tract. In embodiments the protein is endocrine secretion protein or peptide, for example, insulin and other hormones released into the blood stream. In other embodiments, the protein is involved in signaling between or within cells via secreted signaling molecules, for example, paracrine, autocrine, endocrine or neuroendocrine. In embodiments, the secretory protein is selected from the group of cytokines, kinases, hormones and growth factors that bind to receptors on the surface of target cells.

[0240] As described, secretory proteins include hormones, enzymes, toxins, and antimicrobial peptides. Examples of secretory proteins include serine proteases (e.g., pepsins, trypsin, chymotrypsin, elastase and plasminogen activators), amylases, lipases, nucleases (e.g. deoxyribonucleases and ribonucleases), peptidases enzyme inhibitors such as serpins (e.g., al-antitrypsin and plasminogen activator inhibitors), cell attachment proteins such as collagen, fibronectin and laminin, hormones and growth factors such as insulin, growth hormone, prolactin platelet-derived growth factor, epidermal growth factor, fibroblast growth factors, interleukins, interferons, apolipoproteins, and carrier proteins such as transferrin and albumins. In some examples, the secretory protein is insulin or a fragment thereof. In one example, the secretory protein is a precursor of insulin or a fragment thereof. In certain examples, the secretory protein is c-peptide. In a preferred embodiment, the one or more polynucleotides is inserted in the middle of the c-peptide. In some aspects, the secretory protein is GLP-1, glucagon, betatrophin, pancreatic amylase, pancreatic lipase, carboxypeptidase, secretin, CCK, a PPAR (e.g. PPAR-alpha, PPAR-gamma, PPAR-delta or a precursor thereof (e.g. preprotein or preproprotein). In aspects, the secretory protein is fibronectin, a clotting factor protein (e.g. Factor VII, VIII, IX, etc.), a2-macroglobulin, al-antitrypsin, antithrombin III, protein S, protein C, plasminogen, a2-antiplasmin, complement components (e.g. complement component C1-9), albumin, ceruloplasmin, transcortin, haptoglobin, hemopexin, IGF binding protein, retinol binding protein, transferrin, vitamin-D binding protein, transthyretin, IGF-1, thrombopoietin, hepcidin, angiotensinogen, or a precursor protein thereof. In aspects, the secretory protein is pepsinogen, gastric lipase, sucrase, gastrin, lactase, maltase, peptidase, or a precursor thereof. In aspects, the secretory protein is renin, erythropoietin, angiotensin, adrenocorticotropic hormone (ACTH), amylin, atrial natriuretic peptide (ANP), calcitonin, ghrelin, growth hormone (GH), leptin, melanocyte-stimulating hormone (MSH), oxytocin, prolactin, follicle-stimulating hormone (FSH), thyroid stimulating hormone (TSH), thyrotropin-releasing hormone (TRH), vasopressin, vasoactive intestinal peptide, or a precursor thereof.

### Immunomodulatory Polypeptides

[0241] In certain example embodiments, the one or more polypeptides may comprise one or more immunomodulatory protein. In certain embodiments, the present invention provides for modulating immune states. The immune state can be modulated by modulating T cell function or dysfunction. In particular embodiments, the immune state is modulated by expression and secretion of IL-10 and/or other cytokines as described elsewhere herein. In certain embodiments, T cells can affect the overall immune state, such as other immune cells in proximity.

[0242] The polynucleotides may encode one or more immunomodulatory proteins, including immunosuppressive proteins. The term “immunosuppressive” means that immune response in an organism is reduced or depressed. An immunosuppressive protein may suppress, reduce, or mask the immune system or degree of response of the subject being treated. For example, an immunosuppressive protein may suppress cytokine production, downregulate or suppress self-antigen expression, or mask the MHC antigens. As used herein, the term “immune response” refers to a response by a cell of the immune system, such as a B cell, T cell (CD4+ or CD8+), regulatory T cell, antigen-presenting cell, dendritic cell, monocyte, macrophage, NKT cell, NK cell, basophil, eosinophil, or neutrophil, to a stimulus. In some embodiments, the response is specific for a particular antigen (an “antigen-specific response”) and refers to a response by a CD4 T cell, CD8 T cell, or B cell via their antigen-specific receptor. In some embodiments, an immune response is a T cell response, such as a CD4+ response or a CD8+ response. Such responses by these cells can include, for example, cytotoxicity, proliferation, cytokine or chemokine production, trafficking, or phagocytosis, and can be dependent on the nature of the immune cell undergoing the response. In some cases, the immunosuppressive proteins may exert pleiotropic functions. In some cases, the immunomodulatory proteins may maintain proper regulatory T cells versus effector T cells (Treg/Teff) balance. For examples, the immunomodulatory proteins may expand and/or activate the Tregs and blocks the actions of Teffs, thus providing immunoregulation without global immunosuppression. Target genes associated with immune suppression include, for example, checkpoint inhibitors such PD1, Tim3, Lag3, TIGIT, CTLA-4, and combinations thereof.

[0243] The term “immune cell” as used throughout this specification generally encompasses any cell derived from a hematopoietic stem cell that plays a role in the immune response. The term is intended to encompass immune cells both of the innate or adaptive immune system. The immune cell as referred to herein may be a leukocyte, at any stage of differentiation (e.g., a stem cell, a progenitor cell, a mature cell) or any activation stage. Immune cells include lymphocytes (such as natural killer cells, T-cells (including, e.g., thymocytes, Th or Tc; Th1, Th2, Th17, Thαβ, CD4+, CD8+, effector Th, memory Th, regulatory Th, CD4+/CD8+ thymocytes, CD4−/CD8− thymocytes, γδ T cells, etc.) or B-cells (including, e.g., pro-B cells, early pro-B cells, late pro-B cells, pre-B cells, large pre-B cells, small pre-B cells, immature or mature B-cells, producing antibodies of any isotype, T1 B-cells, T2, B-cells, naive B-cells, GC B-cells, plasmablasts, memory B-cells, plasma cells, follicular B-cells, marginal zone B-cells, B-1 cells, B-2 cells, regulatory B cells, etc.), such as for instance, monocytes (including, e.g., classical, non-classical, or intermediate monocytes), (segmented or banded) neutrophils, eosinophils, basophils, mast cells, histiocytes, microglia, including various subtypes, maturation, differentiation, or activation stages, such as for instance hematopoietic stem cells, myeloid progenitors, lymphoid progenitors, myeloblasts, promyelocytes, myelocytes, metamyelocytes, monoblasts, promonocytes, lymphoblasts, prolymphocytes, small lymphocytes, macrophages (including, e.g., Kupffer cells, stellate macrophages, M1 or M2 macrophages), (myeloid or lymphoid) dendritic cells (including, e.g., Langerhans cells, conventional or myeloid dendritic cells, plasmacytoid dendritic cells, mDC-1, mDC-2, Mo-DC, HP-DC, veiled cells), granulocytes, polymorphonuclear cells, antigen-presenting cells (APC), etc.

[0244] T cell response refers more specifically to an immune response in which T cells directly or indirectly mediate or otherwise contribute to an immune response in a subject. T cell-mediated response may be associated with cell mediated effects, cytokine mediated effects, and even effects associated with B cells if the B cells are stimulated, for example, by cytokines secreted by T cells. By means of an example but without limitation, effector functions of MHC class I restricted Cytotoxic T lymphocytes (CTLs), may include cytokine and/or cytolytic capabilities, such as lysis of target cells presenting an antigen peptide recognized by the T cell receptor (naturally-occurring TCR or genetically engineered TCR, e.g., chimeric antigen receptor, CAR), secretion of cytokines, preferably IFN gamma, TNF alpha and/or or more immunostimulatory cytokines, such as IL-2, and/or antigen peptide-induced secretion of cytotoxic effector molecules, such as granzymes, perforins or granulysin. By means of example but without limitation, for MHC class II restricted T helper (Th) cells, effector functions may be antigen peptide-induced secretion of cytokines, preferably, IFN gamma, TNF alpha, IL-4, IL5, IL-10, and/or IL-2. By means of example but without limitation, for T regulatory (Treg) cells, effector functions may be antigen peptide-induced secretion of cytokines, preferably, IL-10, IL-35, and/or TGF-beta. B cell response refers more specifically to an immune response in which B cells directly or indirectly mediate or otherwise contribute to an immune response in a subject. Effector functions of B cells may include in particular production and secretion of antigen-specific antibodies by B cells (e.g., polyclonal B cell response to a plurality of the epitopes of an antigen (antigen-specific antibody response)), antigen presentation, and/or cytokine secretion.

[0245] During persistent immune activation, such as during uncontrolled tumor growth or chronic infections, subpopulations of immune cells, particularly of CD8+ or CD4+ T cells, become compromised to different extents with respect to their cytokine and/or cytolytic capabilities. Such immune cells, particularly CD8+ or CD4+ T cells, are commonly referred to as “dysfunctional” or as “functionally exhausted” or “exhausted”. As used herein, the term “dysfunctional” or “functional exhaustion” refer to a state of a cell where the cell does not perform its usual function or activity in response to normal input signals, and includes refractivity of immune cells to stimulation, such as stimulation via an activating receptor or a cytokine. Such a function or activity includes, but is not limited to, proliferation (e.g., in response to a cytokine, such as IFN-gamma) or cell division, entrance into the cell cycle, cytokine production, cytotoxicity, migration and trafficking, phagocytotic activity, or any combination thereof. Normal input signals can include, but are not limited to, stimulation via a receptor (e.g., T cell receptor, B cell receptor, co-stimulatory receptor). Unresponsive immune cells can have a reduction of at least 10%, 20%, 30%, 40%, 50%, 60%, 70%, 80%, 90%, 95%, or even 100% in cytotoxic activity, cytokine production, proliferation, trafficking, phagocytotic activity, or any combination thereof, relative to a corresponding control immune cell of the same type. In some particular embodiments of the aspects described herein, a cell that is dysfunctional is a CD8+ T cell that expresses the CD8+ cell surface marker. Such CD8+ cells normally proliferate and produce cell killing enzymes, e.g., they can release the cytotoxins perforin, granzymes, and granulysin. However, exhausted/dysfunctional T cells do not respond adequately to TCR stimulation, and display poor effector function, sustained expression of inhibitory receptors and a transcriptional state distinct from that of functional effector or memory T cells. Dysfunction/exhaustion of T cells thus prevents optimal control of infection and tumors. Exhausted/dysfunctional immune cells, such as T cells, such as CD8+ T cells, may produce reduced amounts of IFN-gamma, TNF-alpha and/or one or more immunostimulatory cytokines, such as IL-2, compared to functional immune cells. Exhausted/dysfunctional immune cells, such as T cells, such as CD8+ T cells, may further produce (increased amounts of) one or more immunosuppressive transcription factors or cytokines, such as IL-10 and/or Foxp3, compared to functional immune cells, thereby contributing to local immunosuppression. Dysfunctional CD8+ T cells can be both protective and detrimental against disease control. As used herein, a “dysfunctional immune state” refers to an overall suppressive immune state in a subject or microenvironment of the subject (e.g., tumor microenvironment). For example, increased IL-10 production leads to suppression of other immune cells in a population of immune cells.

[0246] CD8+ T cell function is associated with their cytokine profiles. It has been reported that effector CD8+ T cells with the ability to simultaneously produce multiple cytokines (polyfunctional CD8+ T cells) are associated with protective immunity in patients with controlled chronic viral infections as well as cancer patients responsive to immune therapy (Spranger et al., 2014, J. Immunother. Cancer, vol. 2, 3). In the presence of persistent antigen CD8+ T cells were found to have lost cytolytic activity completely overtime (Moskophidis et al., 1993, Nature, vol. 362, 758-761). It was subsequently found that dysfunctional T cells can differentially produce IL-2, TNFa and IFNg in a hierarchical order (Wherry et al., 2003, J. Virol., vol. 77, 4911-4927). Decoupled dysfunctional and activated CD8+ cell states have also been described (see, e.g., Singer, et al. (2016). A Distinct Gene Module for Dysfunction Uncoupled from Activation in Tumor-Infiltrating T Cells. Cell 166, 1500-1511 e1509; WO/2017/075478; and WO/2018/049025).

[0247] The invention provides compositions and methods for modulating T cell balance. The invention provides T cell modulating agents that modulate T cell balance. For example, in some embodiments, the invention provides T cell modulating agents and methods of using these T cell modulating agents to regulate, influence or otherwise impact the level of and/or balance between T cell types, e.g., between Th17 and other T cell types, for example, Th1-like cells. For example, in some embodiments, the invention provides T cell modulating agents and methods of using these T cell modulating agents to regulate, influence or otherwise impact the level of and/or balance between Th17 activity and inflammatory potential. As used herein, terms such as “Th17 cell” and/or “Th17 phenotype” and all grammatical variations thereof refer to a differentiated T helper cell that expresses one or more cytokines selected from the group the consisting of interleukin 17A (IL-17A), interleukin 17F (IL-17F), and interleukin 17A/F heterodimer (IL17-AF). As used herein, terms such as “Th1 cell” and/or “Th1 phenotype” and all grammatical variations thereof refer to a differentiated T helper cell that expresses interferon gamma (IFNγ). As used herein, terms such as “Th2 cell” and/or “Th2 phenotype” and all grammatical variations thereof refer to a differentiated T helper cell that expresses one or more cytokines selected from the group the consisting of interleukin 4 (IL-4), interleukin 5 (IL-5) and interleukin 13 (IL-13). As used herein, terms such as “Treg cell” and/or “Treg phenotype” and all grammatical variations thereof refer to a differentiated T cell that expresses Foxp3.

[0248] In some examples, immunomodulatory proteins may be immunosuppressive cytokines. In general, cytokines are small proteins and include interleukins, lymphokines and cell signal molecules, such as tumor necrosis factor and the interferons, which regulate inflammation, hematopoiesis, and response to infections. Examples of immunosuppressive cytokines include interleukin 10 (IL-10), TGF-P, IL-Ra, IL-18Ra, IL-2, IL-3, IL-4, IL-5, IL-6, IL-7, IL-8, IL-9, IL-11, IL-12, IL-13, IL-14, IL-15, IL-16, IL-17, IL-19, IL-20, IL-21, IL-22, IL-23, IL-24, IL-25, IL-26, IL-27, IL-28, IL-29, IL-30, IL-31, IL-32, IL-33, IL-34, IL-35, IL-36, IL-37, PGE2, SCF, G-CSF, CSF-1R, M-CSF, GM-CSF, IFN-α, IFN-β, IFN-γ, IFN-4, bFGF, CCL2, CXCL1, CXCL8, CXCL12, CX3CL1, CXCR4, TNF-α and VEGF. Examples of immunosuppressive proteins may further include FOXP3, AHR, TRP53, IKZF3, IRF4, IRF1, and SMAD3. In one example, the immunosuppressive protein is IL-10. In one example, the immunosuppressive protein is IL-6. In one example, the immunosuppressive protein is IL-2.

### Anti-Fibrotic Proteins

[0249] In certain example embodiments, the one or more polypeptides may comprise an anti-fibrotic protein. Examples of anti-fibrotic proteins include any protein that reduces or inhibits the production of extracellular matrix components, fibronectin, proteoglycan, collagen, elastin, TGIFs, and SMAD7. In embodiments, the anti-fibrotic protein is a peroxisome proliferator-activated receptor (PPAR) or may include one or more PPARs. In some embodiments, the protein is PPARα, PPAR γ is a dual PPARα/γ. Derosa et al., “The role of various peroxisome proliferator-activated receptors and their ligands in clinical practice” Jan. 18, 2017 J. Cell. Phys. 223:1 153-161.

Proteins that Promote Tissue Regeneration and or Transplant Survival Functions

[0250] In certain example embodiments, the one or more polypeptides may comprise proteins that promote tissue regeneration and/or transplant survival functions. In some cases, such proteins may induce and/or up-regulate the expression of genes for pancreatic β cell regeneration. In some cases, the proteins that promote transplant survival and functions include the products of genes for pancreatic R cell regeneration. Such genes may include proislet peptides that are proteins or peptides derived from such proteins that stimulate islet cell neogenesis. Examples of genes for pancreatic R cell regeneration include Reg1, Reg2, Reg3, Reg4, human proislet peptide, parathyroid hormone-related peptide (1-36), glucagon-like peptide-1 (GLP-1), extendin-4, prolactin, Hgf, Igf-1, Gip-1, adipsin, resistin, leptin, IL-6, IL-10, Pdx1, Ptfal, Mafa, Pax6, Pax4, Nkx6.1, Nkx2.2, PDGF, vglycin, placental lactogens (somatomammotropins, e.g., CSH1, CHS2), isoforms thereof, homologs thereof, and orthologs thereof. In certain embodiments, the protein promoting pancreatic B cell regeneration is a cytokine, myokine, and/or adipokine.

### Hormones

[0251] In certain embodiments, the one or mor polynucleotides may comprise one or more hormones. The term “hormone” refers to polypeptide hormones, which are generally secreted by glandular organs with ducts. Hormones include proteins from natural sources or from recombinant cell culture and biologically active equivalents of the native sequence hormone, including synthetically produced small-molecule entities and pharmaceutically acceptable derivatives and salts thereof. Included among the hormones are, for example, growth hormone such as human growth hormone, N-methionyl human growth hormone, and bovine growth hormone; parathyroid hormone; thyroxine; insulin; proinsulin; relaxin; prorelaxin; glycoprotein hormones such as follicle stimulating hormone (FSH), thyroid stimulating hormone (TSH), and luteinizing hormone (LH); prolactin, placental lactogen, mouse gonadotropin-associated peptide, inhibin; activin; mullerian-inhibiting substance; and thrombopoietin, growth hormone (GH), adrenocorticotropic hormone (ACTH), dehydroepiandrosterone (DHEA), cortisol, epinephrine, thyroid hormone, estrogen, progesterone, placental lactogens (somatomammotropins, e.g. CSH1, CHS2), testosterone. and neuroendocrine hormones. In certain examples, the hormone is secreted from pancreas, e.g., insulin, glucagon, somatostatin, pancreatic polypeptide and ghrelin. In some examples, the hormone is insulin.

[0252] Hormones herein may also include growth factors, e.g., fibroblast growth factor (FGF) family, bone morphogenic protein (BMP) family, platelet derived growth factor (PDGF) family, transforming growth factor beta (TGFbeta) family, nerve growth factor (NGF) family, epidermal growth factor (EGF) family, insulin related growth factor (IGF) family, hepatocyte growth factor (HGF) family, hematopoietic growth factors (HeGFs), platelet-derived endothelial cell growth factor (PD-ECGF), angiopoietin, vascular endothelial growth factor (VEGF) family, and glucocorticoids. In a particular embodiment, the hormone is insulin or incretins such as exenatide, GLP-1.

### Neurohormones

[0253] In embodiments, the secreted peptide is a neurohormone, a hormone produced and released by neuroendocrine cells. Example neurohormones include Thyrotropin-releasing hormone, Corticotropin-releasing hormone, Histamine, Growth hormone-releasing hormone, Somatostatin, Gonadotropin-releasing hormone, Serotonin, Dopamine, Neurotensin, Oxytocin, Vasopressin, Epinephrine, and Norepinephrine.

### Anti-Microbial Proteins

[0254] In some embodiments, the one or more polypeptides may comprise one or more anti-microbial proteins. In embodiments where the cell is mammalian cell, human host defense antimicrobial peptides and proteins (AMPs) play a critical role in warding off invading microbial pathogens. In certain embodiments, the anti-microbial is α-defensin HD-6, HNP-1 and β-defensin hBD-3, lysozyme, cathelcidin LL-37, C-type lectin RegIIIalpha, for example. See, e.g., Wang, “Human Antimicrobial Peptide and Proteins” Pharma, May 2014, 7(5): 545-594, incorporated herein by reference.

### Anti-Fibrillating Proteins

[0255] In certain example embodiments, the one or more polypeptides may comprise one or more anti-fibrillating polypeptides. The anti-fibrillating polypeptide can be the secreted polypeptide. In some embodiments, the anti-fibrillating polypeptide is co-expressed with one or more other polynucleotides and/or polypeptides described elsewhere herein. The anti-fibrillating agent can be secreted and act to inhibit the fibrillation and/or aggregation of endogenous proteins and/or exogenous proteins that it may be co-expressed therewith. In some embodiments, the anti-fibrillating agent is P4 (VITYF (SEQ ID NO: 1700)), P5 (VVVVV (SEQ ID NO: 1701)), KR7 (KPWWPRR (SEQ ID NO: 1702)), NK9 (NIVNVSLVK (SEQ ID NO: 1703)), iAb5p (Leu-Pro-Phe-Phe-Asp (SEQ ID NO: 1704)), KLVF (SEQ ID NO: 1705) and derivatives thereof, indolicidin, camosine, a hexapeptide as set forth in Wang et al. 2014. ACS Chem Neurosci. 5:972-981, alpha sheet peptides having alternating D-amino acids and L-amino acids as set forth in Hopping et al. 2014. Elife 3:e01681, D-(PGKLVYA) (SEQ ID NO: 1706), RI-OR2-TAT, cyclo(17, 21)-(Lysl7, Asp21)A_(1-28), SEN304, SEN1576, D3, R8-Aβ(25-35), human yD-crystallin (HGD), poly-lysine, heparin, poly-Asp, polyGl, poly-L-lysine, poly-L-glutamic acid, LVEALYL (SEQ ID NO: 1707), RGFFYT (SEQ ID NO: 1708), a peptide set forth or as designed/generated by the method set forth in U.S. Pat. No. 8,754,034, and combinations thereof. In aspects, the anti-fibrillating agent is a D-peptide. In aspects, the anti-fibrillating agent is an L-peptide. In aspects, the anti-fibrillating agent is a retro-inverso modified peptide. Retro-inverso modified peptides are derived from peptides by substituting the L-amino acids for their D-counterparts and reversing the sequence to mimic the original peptide since they retain the same spatial positioning of the side chains and 3D structure. In aspects, the retro-inverso modified peptide is derived from a natural or synthetic Ap peptide. In some embodiments, the polynucleotide encodes a fibrillation resistant protein. In some embodiments, the fibrillation resistant protein is a modified insulin, see e.g., U.S. Pat. No. 8,343,914.

### Antibodies

[0256] In certain embodiments, the one or more polypeptides may comprise one or more antibodies. The term “antibody” is used interchangeably with the term “immunoglobulin” herein, and includes intact antibodies, fragments of antibodies, e.g., Fab, F(ab′)2 fragments, and intact antibodies and fragments that have been mutated either in their constant and/or variable region (e.g., mutations to produce chimeric, partially humanized, or fully humanized antibodies, as well as to produce antibodies with a desired trait, e.g., enhanced binding and/or reduced FcR binding). The term “fragment” refers to a part or portion of an antibody or antibody chain comprising fewer amino acid residues than an intact or complete antibody or antibody chain. Fragments can be obtained via chemical or enzymatic treatment of an intact or complete antibody or antibody chain. Fragments can also be obtained by recombinant means. Exemplary fragments include Fab, Fab′, F(ab′)2, Fabc, Fd, dAb, V_{HH} and scFv and/or Fv fragments.

### Protease Cleavage Sites

[0257] The one or more cargo polypeptides, as exemplified above, may comprise one or more protease cleavage sites, i.e., amino acid sequences that can be recognized and cleaved by a protease. The protease cleavage sites may be used for generating desired gene products (e.g., intact gene products without any tags or portion of other proteins). The protease cleavage site may be one end or both ends of the protein. Examples of protease cleavage sites that can be used herein include an enterokinase cleavage site, a thrombin cleavage site, a Factor Xa cleavage site, a human rhinovirus 3C protease cleavage site, a tobacco etch virus (TEV) protease cleavage site, a dipeptidyl aminopeptidase cleavage site and a small ubiquitin-like modifier (SUMO)/ubiquitin-like protein-1(ULP-1) protease cleavage site. In certain examples, the protease cleavage site comprises Lys-Arg.

### Small Molecules

[0258] In some embodiments, the cargo molecule is a small molecule. Techniques and methods of coupling peptides to small molecule agents are generally known in the art and can be applied here to couple a targeting moiety effective to target a CNS cell to a small molecule cargo. Small molecules include, without limitation, hormones, immunomodulators, antipyretics, anxiolytics, antipsychotics, analgesics, antispasmodics, anti-inflammatories, anti-histamines, anti-infectives, radiation sensitizers, chemotherapeutics.

[0259] Suitable hormones include, but are not limited to, amino-acid derived hormones (e.g., melatonin and thyroxine), small peptide hormones and protein hormones (e.g., thyrotropin-releasing hormone, vasopressin, insulin, growth hormone, luteinizing hormone, follicle-stimulating hormone, and thyroid-stimulating hormone), eicosanoids (e.g., arachidonic acid, lipoxins, and prostaglandins), and steroid hormones (e.g., estradiol, testosterone, tetrahydro testosteron Cortisol). Suitable immunomodulators include, but are not limited to, prednisone, azathioprine, 6-MP, cyclosporine, tacrolimus, methotrexate, interleukins (e.g., IL-2, IL-7, and IL-12), cytokines (e.g., interferons (e.g., IFN-α, IFN-β, IFN-ε, IFN-K, IFN-Ω, and IFN-γ), granulocyte colony-stimulating factor, and imiquimod), chemokines (e.g., CCL3, CCL26 and CXCL7), cytosine phosphate-guanosine, oligodeoxynucleotides, glucans, antibodies, and aptamers).

[0260] Suitable antipyretics include, but are not limited to, non-steroidal anti-inflammants (e.g., ibuprofen, naproxen, ketoprofen, and nimesulide), aspirin and related salicylates (e.g., choline salicylate, magnesium salicylae, and sodium salicaylate), paracetamol/acetaminophen, metamizole, nabumetone, phenazone, and quinine.

[0261] Suitable anxiolytics include, but are not limited to, benzodiazepines (e.g., alprazolam, bromazepam, chlordiazepoxide, clonazepam, clorazepate, diazepam, flurazepam, lorazepam, oxazepam, temazepam, triazolam, and tofisopam), serotenergic antidepressants (e.g. selective serotonin reuptake inhibitors, tricyclic antidepresents, and monoamine oxidase inhibitors), mebicar, afobazole, selank, bromantane, emoxypine, azapirones, barbiturates, hydroxyzine, pregabalin, validol, and beta blockers.

[0262] Suitable antipsychotics include, but are not limited to, benperidol, bromoperidol, droperidol, haloperidol, moperone, pipaperone, timiperone, fluspirilene, penfluridol, pimozide, acepromazine, chlorpromazine, cyamemazine, dizyrazine, fluphenazine, levomepromazine, mesoridazine, perazine, pericyazine, perphenazine, pipotiazine, prochlorperazine, promazine, promethazine, prothipendyl, thioproperazine, thioridazine, trifluoperazine, triflupromazine, chlorprothixene, clopenthixol, flupentixol, tiotixene, zuclopenthixol, clotiapine, loxapine, prothipendyl, carpipramine, clocapramine, molindone, mosapramine, sulpiride, veralipride, amisulpride, amoxapine, aripiprazole, asenapine, clozapine, blonanserin, iloperidone, lurasidone, melperone, nemonapride, olanzapine, paliperidone, perospirone, quetiapine, remoxipride, risperidone, sertindole, trimipramine, ziprasidone, zotepine, alstonie, befeprunox, bitopertin, brexpiprazole, cannabidiol, cariprazine, pimavanserin, pomaglumetad methionil, vabicaserin, xanomeline, and zicronapine.

[0263] Suitable analgesics include, but are not limited to, paracetamol/acetaminophen, nonsteroidal anti-inflammants (e.g. ibuprofen, naproxen, ketoprofen, and nimesulide), COX-2 inhibitors (e.g. rofecoxib, celecoxib, and etoricoxib), opioids (e.g. morphine, codeine, oxycodone, hydrocodone, dihydromorphine, pethidine, buprenorphine), tramadol, norepinephrine, flupiretine, nefopam, orphenadrine, pregabalin, gabapentin, cyclobenzaprine, scopolamine, methadone, ketobemidone, piritramide, and aspirin and related salicylates (e.g., choline salicylate, magnesium salicylate, and sodium salicylate).

[0264] Suitable antispasmodics include, but are not limited to, mebeverine, papverine, cyclobenzaprine, carisoprodol, orphenadrine, tizanidine, metaxalone, methodcarbamol, chlorzoxazone, baclofen, dantrolene, baclofen, tizanidine, and dantrolene. Suitable anti-inflammatories include, but are not limited to, prednisone, non-steroidal anti-inflammants (e.g., ibuprofen, naproxen, ketoprofen, and nimesulide), COX-2 inhibitors (e.g., rofecoxib, celecoxib, and etoricoxib), and immune selective anti-inflammatory derivatives (e.g., submandibular gland peptide-T and its derivatives).

[0265] Suitable anti-histamines include, but are not limited to, H1-receptor antagonists (e.g., acrivastine, azelastine, bilastine, brompheniramine, buclizine, bromodiphenhydramine, carbinoxamine, cetirizine, chlorpromazine, cyclizine, chlorpheniramine, clemastine, cyproheptadine, desloratadine, dexbromapheniramine, dexchlorpheniramine, dimenhydrinate, dimetindene, diphenhydramine, doxylamine, ebasine, embramine, fexofenadine, hydroxyzine, levocetirzine, loratadine, meclozine, mirtazapine, olopatadine, orphenadrine, phenindamine, pheniramine, phenyltoloxamine, promethazine, pyrilamine, quetiapine, rupatadine, tripelennamine, and triprolidine), H2-receptor antagonists (e.g., cimetidine, famotidine, lafutidine, nizatidine, rafitidine, and roxatidine), tritoqualine, catechin, cromoglicate, nedocromil, and p2-adrenergic agonists.

[0266] Suitable anti-infectives include, but are not limited to, amebicides (e.g., nitazoxanide, paromomycin, metronidazole, tinidazole, chloroquine, miltefosine, amphotericin b, and iodoquinol), aminoglycosides (e.g., paromomycin, tobramycin, gentamicin, amikacin, kanamycin, and neomycin), anthelmintics (e.g., pyrantel, mebendazole, ivermectin, praziquantel, abendazole, thiabendazole, oxamniquine), antifungals (e.g., azole antifungals (e.g., itraconazole, fluconazole, posaconazole, ketoconazole, clotrimazole, miconazole, and voriconazole), echinocandins (e.g., caspofungin, anidulafungin, and micafungin), griseofulvin, terbinafine, flucytosine, and polyenes (e.g., nystatin, and amphotericin b), antimalarial agents (e.g., pyrimethamine/sulfadoxine, artemether/lumefantrine, atovaquone/proquanil, quinine, hydroxychloroquine, mefloquine, chloroquine, doxycycline, pyrimethamine, and halofantrine), antituberculosis agents (e.g., aminosalicylates (e.g., aminosalicylic acid), isoniazid/rifampin, isoniazid/pyrazinamide/rifampin, bedaquiline, isoniazid, ethambutol, rifampin, rifabutin, rifapentine, capreomycin, and cycloserine), antivirals (e.g., amantadine, rimantadine, abacavir/lamivudine, emtricitabine/tenofovir, cobicistat/elvitegravir/emtricitabine/tenofovir, efavirenz/emtricitabine/tenofovir, avacavir/lamivudine/zidovudine, lamivudine/zidovudine, emtricitabine/tenofovir, emtricitabine/opinavir/ritonavir/tenofovir, interferon alfa-2v/ribavirin, peginterferon alfa-2b, maraviroc, raltegravir, dolutegravir, enfuvirtide, foscarnet, fomivirsen, oseltamivir, zanamivir, nevirapine, efavirenz, etravirine, rilpivirine, delaviridine, nevirapine, entecavir, lamivudine, adefovir, sofosbuvir, didanosine, tenofovir, avacivr, zidovudine, stavudine, emtricitabine, xalcitabine, telbivudine, simeprevir, boceprevir, telaprevir, lopinavir/ritonavir, fosamprenvir, dranuavir, ritonavir, tipranavir, atazanavir, nelfinavir, amprenavir, indinavir, sawuinavir, ribavirin, valcyclovir, acyclovir, famciclovir, ganciclovir, and valganciclovir), carbapenems (e.g., doripenem, meropenem, ertapenem, and cilastatin/imipenem), cephalosporins (e.g., cefadroxil, cephradine, cefazolin, cephalexin, cefepime, ceflaroline, loracarbef, cefotetan, cefuroxime, cefprozil, loracarbef, cefoxitin, cefaclor, ceftibuten, ceftriaxone, cefotaxime, cefpodoxime, cefdinir, cefixime, cefditoren, cefizoxime, and ceftazidime), glycopeptide antibiotics (e.g., vancomycin, dalbavancin, oritavancin, and telvancin), glycylcyclines (e.g., tigecycline), leprostatics (e.g., clofazimine and thalidomide), lincomycin and derivatives thereof (e.g., clindamycin and lincomycin), macrolides and derivatives thereof (e.g., telithromycin, fidaxomicin, erthromycin, azithromycin, clarithromycin, dirithromycin, and troleandomycin), linezolid, sulfamethoxazole/trimethoprim, rifaximin, chloramphenicol, fosfomycin, metronidazole, aztreonam, bacitracin, penicillins (amoxicillin, ampicillin, bacampicillin, carbenicillin, piperacillin, ticarcillin, amoxicillin/clavulanate, ampicillin/sulbactam, piperacillin/tazobactam, clavulanate/ticarcillin, penicillin, procaine penicillin, oxaxillin, dicloxacillin, and nafcillin), quinolones (e.g., lomefloxacin, norfloxacin, ofloxacin, qatifloxacin, moxifloxacin, ciprofloxacin, levofloxacin, gemifloxacin, moxifloxacin, cinoxacin, nalidixic acid, enoxacin, grepafloxacin, gatifloxacin, trovafloxacin, and sparfloxacin), sulfonamides (e.g., sulfamethoxazole/trimethoprim, sulfasalazine, and sulfasoxazole), tetracyclines (e.g., doxycycline, demeclocycline, minocycline, doxycycline/salicyclic acid, doxycycline/omega-3 polyunsaturated fatty acids, and tetracycline), and urinary anti-infectives (e.g., nitrofurantoin, methenamine, fosfomycin, cinoxacin, nalidixic acid, trimethoprim, and methylene blue).

[0267] Suitable chemotherapeutics include, but are not limited to, paclitaxel, brentuximab vedotin, doxorubicin, 5-FU (fluorouracil), everolimus, pemetrexed, melphalan, pamidronate, anastrozole, exemestane, nelarabine, ofatumumab, bevacizumab, belinostat, tositumomab, carmustine, bleomycin, bosutinib, busulfan, alemtuzumab, irinotecan, vandetanib, bicalutamide, lomustine, daunorubicin, clofarabine, cabozantinib, dactinomycin, ramucirumab, cytarabine, Cytoxan, cyclophosphamide, decitabine, dexamethasone, docetaxel, hydroxyurea, decarbazine, leuprolide, epirubicin, oxaliplatin, asparaginase, estramustine, cetuximab, vismodegib, asparginase Erwinia chrysanthemi, amifostine, etoposide, flutamide, toremifene, fulvestrant, letrozole, degarelix, pralatrexate, methotrexate, floxuridine, obinutuzumab, gemcitabine, afatinib, imatinib mesylatem, carmustine, eribulin, trastuzumab, altretamine, topotecan, ponatinib, idarubicin, ifosfamide, ibrutinib, axitinib, interferon alfa-2a, gefitinib, romidepsin, ixabepilone, ruxolitinib, cabazitaxel, ado-trastuzumab emtansine, carfilzomib, chlorambucil, sargramostim, cladribine, mitotane, vincristine, procarbazine, megestrol, trametinib, mesna, strontium-89 chloride, mechlorethamine, mitomycin, busulfan, gemtuzumab ozogamicin, vinorelbine, filgrastim, pegfilgrastim, sorafenib, nilutamide, pentostatin, tamoxifen, mitoxantrone, pegaspargase, denileukin diftitox, alitretinoin, carboplatin, pertuzumab, cisplatin, pomalidomide, prednisone, aldesleukin, mercaptopurine, zoledronic acid, lenalidomide, rituximab, octretide, dasatinib, regorafenib, histrelin, sunitinib, siltuximab, omacetaxine, thioguanine (tioguanine), dabrafenib, erlotinib, bexarotene, temozolomide, thiotepa, thalidomide, BCG, temsirolimus, bendamustine hydrochloride, triptorelin, aresnic trioxide, lapatinib, valrubicin, panitumumab, vinblastine, bortezomib, tretinoin, azacitidine, pazopanib, teniposide, leucovorin, crizotinib, capecitabine, enzalutamide, ipilimumab, goserelin, vorinostat, idelalisib, ceritinib, abiraterone, epothilone, tafluposide, azathioprine, doxifluridine, vindesine, and all-trans retinoic acid.

### Muscle Disease Cargos

[0268] In some embodiments, the cargo molecule can be a polynucleotide or polypeptide that can alone or when delivered as part of a system, whether or not delivered with other components of the system, operate to modify the genome, epigenome, and/or transcriptome of a cell to which it is delivered, is such that it treats or prevents a disease, a disorder, or a symptom thereof of a muscle disease, disorder, or a symptom thereof, a CNS disease, disorder and/or a symptom thereof, or both. In some embodiments, the cargo molecule, whether or not delivered with other components of the system, operate to modify the genome, epigenome, and/or transcriptome of a cell to which it is delivered, is such that it treats or prevents a disease, a disorder, or a symptom thereof of a muscle disease, disorder, or a symptom thereof, a CNS disease, disorder and/or a symptom thereof, or both. In some embodiments, the disease or disorder is a progeroid disease, (e.g., progeroid laminopathy) a glycogen storage disease an immune disorder (such as an autoimmune disease), a cancer, Duchenne muscular dystrophy (DMD), 6 Limb-girdle muscular dystrophy diseases (LGMD), Charcot-Marie-Tooth (CMT), MPS IIIA, Pompe disease, or other CNS-related diseases such as Huntington's and other expanded repeat diseases.

[0269] In some embodiments, the cargo molecule, whether or not delivered with other components of the system, operate to modify the genome, epigenome, and/or transcriptome of a cell to which it is delivered, is such that can modify the GAA gene, such as any of those described in US Pat. App. Pub. 20190284555, the contents of which are incorporated by reference as if expressed in their entirety herein and can be adapted for use with the present invention.

[0270] In some embodiments, the cargo molecule includes an oligonucleotide coupled to a MHCK7, CK8, or other muscle specific promoter.

[0271] In some embodiments, the cargo molecule is a micro-dystrophin oligonucleotide that contains only selected regions of the dystrophin gene optimized for protein functionality. In some embodiments, the selected regions include spectrin-like repeats 1, 2, 3, and 24. See e.g., Harper S Q, Hauser M A, DelloRusso C, et al. Modular flexibility of dystrophin: implications for gene therapy of Duchenne muscular dystrophy. Nat Med. 2002; 8(3):253-261. In some embodiments, the micro-dystrophin oligonucleotide is that is delivered by the rAAV agent known as AAVrh74.MHCK7 microdystrophin gene or SRP-9001, which is subject to the clinical trials NCT03375164 and NCT03769116. This microdystrophin gene construct includes NT-H1-R1-R2-R3-H2-R24-H4-CR-CT. In some embodiments, the microdystrophin gene includes ABD-H1-R1-R2-R3-H2-R24-H4-CR-CT. In some embodiments, the microdystrophin gene includes H stands for hinge region. England S B, et al. Nature. 1990; 343(6254):180-182; Wells D J, et al. Hum Mol Genet. 1995; 4(8):1245-1250, Salva M Z, et al. Mol Ther. 2007; 15(2):320-329; Mendell J R, et al. Neurosci Lett. 2012; 527(2):90-99; Rodino-Klapac L R, et al. Hum Mol Genet. 2013; 22(24):4929-4937; Velazquez V M, et al. Mol Ther Methods Clin Dev. 2017; 4:159-168; Harper S Q, et al. Nat Med. 2002; 8(3):253-261; Nelson D M, et al. Hum Mol Genet. 2018; 27(12):2090-2100. In some embodiments, the selected regions at least include spectrin-like repeats 2 and 3. In some embodiments, the micro-dystrophin gene contains a nNOS domain. In some embodiments, the nNOS domain is composed of spectrin-like repeats 16 and/or 17. In some embodiments, the micro-dystrophin gene includes spectrin-like repeats 16 and 17. In some embodiments, the nNOS domain is composed of spectrin-like repeats RI, R16, R17, R23, and R24. In some embodiments, the micro-dystrophin gene is coupled to a muscle specific promoter. In some embodiments, the micro-dystrophin oligonucleotide is coupled to a MHCK7, CK8, SNP18, SP0033, SP0051, SP0173, tmCK, or another muscle specific promoter.

[0272] In some embodiments, the cargo micro-dystrophin includes an ABD (actin binding domain), one or more hinge regions (e.g., H1, H2, H3, H4,), and one or more spectrin-like repeats (e.g., R1, R1′ R2, R3, R16, R17, R20, R21, R22, R23, R24, R24′ and optionally a dystroglycan binding domain (DBD). In some embodiments, the micro-dystrophin is composed of ABD-H1-R1-R16-R17-R23-R24-H4-DBD. In some embodiments, the micro-dystrophin is composed of ABD-H1-R1-R2-R3-H2-R24-H4-CR. In some embodiments, the micro-dystrophin gene includes ABD-H1-R1-R2-R3-H2-R24-H4-CR-CT. In some embodiments, the micro-dystrophin gene includes ABD-H1-R1′-R24′-H4-CR-CT.

[0273] In some embodiments, the cargo molecule is a polynucleotide that can encode a micro-dystrophin gene, where the micro-dystrophin gene contains spectrin-like repeats, R1, R16, R17, R23 and R24. In some embodiments, the micro-dystrophin gene contains hinge region (H) 4 and/or H1. In some embodiments, the micro-dystrophin gene contains the N-terminal actin binding domain. In some embodiments, the micro-dystrophin gene contains the C-terminal dystroglycan binding domain of the human full-length dystrophin protein. The micro-dystrophin gene can contain an nNOS domain. In some embodiments, the nNOS domain is composed of spectrin-like repeats 16 and/or 17. In some embodiments, the micro-dystrophin gene includes spectrin-like repeats 16 and 17. The micro-dystrophin gene can be as described in WO2019118806A1 and WO2016/115543, which are incorporated by reference as if expressed in their entirety herein and can be adapted for use with the present invention. In some embodiments, the cargo polynucleotide can encode a 5-repeat micro-dystrophin protein that contains, from N- to C-terminus, the N-terminal actin binding domain, Hinge region 1 (HI), spectrin-like repeats RI, R16, R17, R23, and R24, Hinge region 4 (H4), and the C-terminal dystroglycan binding domain of the human full-length dystrophin protein. The protein sequence of this 5-repeat micro-dystrophin and the related dystrophin minigene are described in WO2016/115543. In some embodiments, the cargo polynucleotide can correspond to a micro-dystrophin gene that is part of the agent known as SGT001 as currently in clinical trial having the identifier number NCT03368742.

[0274] In some embodiments, the cargo molecule is a minidys gene or vector. In some embodiments, the minidys gene or vector can be composed of ABD-H1-R1-R2-R3-R16-R17-H3-R20-R21; ABD-H1-RI-R2-R3-R16-R17-H3-R20-R21-R22-R23-R24-H4-CR; or H3-R20-R21-R22-R23-R24-H4-CR-CT.

[0275] In some embodiments, the cargo molecule is an SCGB cDNA. In some embodiments, the SGCB cDNA is coupled to a MHCK7, CK8 promoter, SNP18 promoter, SP0033 promoter, SP0051, SP0173 promoter, tmCK promoter or another muscle specific promoter. In some embodiments, the cargo molecule is a beta-sarcoglycan cDNA, an alpha-sarcoglycan cDNA, a dysferlin cDNA, a gamma-sarcoglycan cDNA, a Calpin-3 cDNA, a SGSH cDNA (e.g., LYS-SAF302), a neurtropin 3 cDNA, an anoctamin-5 cDNA, or any combination thereof.

[0276] In some embodiments, the cargo molecule, whether or not delivered with other components of the system, operate to modify the genome, epigenome, and/or transcriptome of a cell to which it is delivered, is such that treat, prevent, and/or modify a gene or gene product associated with an expanded repeat disease, such as Huntington's disease, such as those described in U.S. Pat. App. Pub. 20190100755, U.S. patent Ser. No. 10/066,228, the contents of which are incorporated by reference as if expressed in their entirety herein and can be adapted for use with the present invention.

[0277] In some embodiments, the cargo molecule is an antisense oligomer or RNA molecule, such as those described in U.S. Pat. App. Pub. US20160251398, US20150267202, US20190015440, US20140287983, US20180216111, WO/2017/062835, US20190177723, US20170051278, US20180271893, WO/2016/14965, U.S. patent Ser. No. 10/076,536, WO/2018/00580, WO/2018/11866, WO/2019/059973, the contents of which are incorporated by reference as if expressed in their entirety herein and can be adapted for use with the present invention.

[0278] In some embodiments, the cargo molecule, whether or not delivered with other components of the system, operate to modify the genome, epigenome, and/or transcriptome of a cell to which it is delivered, is such that it treats or prevents a single stranded RNA virus, such influenza, West Nile Virus, SARS, Hepatitis C, dengue fever, Ebola, Marburg, and/or Calicivirus. In some embodiments the cargo molecule can be an antisense antiviral compound, such as any of those described in U.S. Pat. No. 8,703,735B2, the contents of which are incorporated by reference as if expressed in their entirety herein and can be adapted for use with the present invention.

[0279] Additional, exemplary genetic and gene associated diseases and genes capable of being modified by a cargo molecule described herein are listed elsewhere herein, see e.g., Tables 12-13.

[0280] In some embodiments, the cargo molecule can add or modify a GALGT2 gene. Instead of acting to resupply missing dystrophin, GALGT2 gene therapy fortifies the structural integrity of muscle in ways that compensate for the absence of dystrophin, by increasing expression of proteins not mutated or lost in the disease. GALGT2 offers the potential to treat DMD irrespective of specific dystrophin mutation, as well as having utility in other muscular dystrophies.

[0281] In some embodiments the cargo molecule is a morpholino, such as in US Patent Application Pub. US2018/0161359 and US2019/0054113 the contents of which are incorporated by reference as if expressed in their entirety herein and can be adapted for use with the present invention. In some embodiments, the morpholino is a morpholino oligomer (PMO) or a peptide linked morpholino PPMO. PMO based platforms can be used to treat genetic diseases by altering mRNA transcription. PMOs are synthetic chemical structures modeled after the natural framework of RNA. While PMOs have the same nucleic acid bases found in RNA, they are bound to six-sided morpholine rings instead of five-sided ribose rings. In addition, the morpholine rings are connected to each other by phosphorodiamidate linkages instead of the phosphodiester linkages found in RNA. PMOs and PPMOs can be used for exon skipping and translation suppression.

[0282] In some embodiments, the cargo molecule can be a peptide-oligomer, conjugate as described in e.g., International Patent Application Publication WO2017106304A 1, the contents of which are incorporated by reference as if expressed in their entirety herein and can be adapted for use with the present invention.

[0283] In some embodiments, the morpholino is the morpholino found in Eteplirsen, which can be effective to target Exon 51 of the dystrophin mRNA. In some embodiments the cargo molecule can generate exon skipping in the context of DMD, such as those described in e.g., US Patent Application Pub. US2014/0315977A1 and US2018/010581, the contents of which are incorporated by reference as if expressed in their entirety herein and can be adapted for use with the present invention.

### Exon Skipping

[0284] In some embodiments, the nucleotide sequences may encode nucleic acids capable of inducing exon skipping. Such encoded nucleic acids may be antisense oligonucleotides or antisense nucleotide systems. As used herein, the term “exon skipping” refers to the modification of pre-mRNA splicing by the targeting of splice donor and/or acceptor sites within a pre-mRNA with one or more complementary antisense oligonucleotide(s) (AONs). By blocking access of a spliceosome to one or more splice donor or acceptor site, an AON may prevent a splicing reaction thereby causing the deletion of one or more exons from a fully-processed mRNA. Exon skipping may be achieved in the nucleus during the maturation process of pre-mRNAs. In some examples, exon skipping may include the masking of key sequences involved in the splicing of targeted exons by using antisense oligonucleotides (AON) that are complementary to splice donor sequences within a pre-mRNA.

[0285] In some embodiments, the nucleotide sequences encode antisense oligonucleotides or antisense nucleotide systems capable of inducing exon skipping in dystrophin mRNA. For example, a non-sense or frameshift mutation within exon x of a dystrophin gene yields a carboxy-terminally truncated, non-functional dystrophin protein. The expression of that mature mRNA transcript may yield a functional dystrophin protein that is deleted in the amino acids encoded by exon x but that includes dystrophin amino acids both N-terminal and C-terminal to those deleted amino acids.

[0286] The nucleotide sequences may encode antisense oligonucleotides or antisense nucleotide systems capable of inducing exon skipping at exon 1, 2, 3, 4, 5, 6, 7, 8, 10, 11, 12, 13, 14, 15, 16, 17, 18, 19, 20, 21, 22, 23, 24, 25, 26, 27, 28, 29, 30, 31, 32, 33, 34, 45, 36, 37, 38, 39, 40, 41, 42, 43, 44, 45, 46, 47, 48, 49, 50, 51, 52, 53, 54, 55, 56, 57, 58, 59, 60, 61, 62, 63, 64, 65, 66, 67, 68, 69, 70, 71, 72, 73, 74, 75, 76, 77, 78, 79, or any combination thereof. The nucleotide sequences may encode antisense oligonucleotides or antisense nucleotide systems capable of inducing exon skipping at exon 43, 44, 50, 51, 52, 55, or any combination thereof.

### Engineered Viral Capsids and Encoding Polynucleotides

[0287] Described herein are exemplary embodiments of engineered viral proteins, (e.g., capsid proteins), such as adeno-associated virus (AAV) viral proteins (e.g., capsid proteins), that can be engineered to confer cell-specific tropism to an engineered viral particle (AAV particle) that contains the engineered viral protein(s). The engineered viral protein(s) (e.g., capsid(s)) can be included in an engineered virus particle, and can confer cell-specific tropism, such as both a CNS and muscle specific tropism or a muscle specific tropism, reduced immunogenicity, or both to the engineered viral (e.g., an AAV) particle. As is described elsewhere herein, the particles can include a cargo. In this way, the particles can be a cell-specific delivery vehicle for a cargo. The engineered viral capsids described herein can include one or more engineered viral capsid proteins described herein. Engineered viral capsid proteins can be lentiviral, retroviral, adenoviral, or AAV. Engineered capsids can contain one or more of the viral capsid proteins. Engineered virus particles can include one or more of the engineered viral capsid proteins and thus contain an engineered viral capsid. The engineered viral capsid proteins, capsids, and/or viral particles that contain one or more CNS-muscle specific or muscle specific targeting moieties containing or composed of one or more n-mer insert s described elsewhere herein. In some embodiments, the engineered viral capsid proteins, viral capsids, and/or viral particles can have both a CNS and muscle specific tropism or a muscle tropism (e.g., a cardiac muscle specific tropism and/or a skeletal muscle specific tropism) conferred to it by the one or more n-mer inserts contained therein.

[0288] The CNS-muscle specific or muscle specific n-mer inserts and targeting moieties can be encoded in whole or in part by a polynucleotide. The engineered viral capsid and/or viral capsid proteins can be encoded by one or more engineered viral capsid polynucleotides. In some embodiments, the engineered viral capsid polynucleotide is an engineered AAV capsid polynucleotide, engineered lentiviral capsid polynucleotide, engineered retroviral capsid polynucleotide, or engineered adenovirus capsid polynucleotide. In some embodiments, an engineered viral capsid polynucleotide (e.g., an engineered AAV capsid polynucleotide, engineered lentiviral capsid polynucleotide, engineered retroviral capsid polynucleotide, or engineered adenovirus capsid polynucleotide) can include a 3′ polyadenylation signal. The polyadenylation signal can be an SV40 polyadenylation signal.

[0289] The engineered AAV capsids can be variants of wild-type AAV capsids. In some embodiments, the wild-type AAV capsids can be composed of VP1, VP2, VP3 capsid proteins or a combination thereof. In other words, the engineered AAV capsids can include one or more variants of a wild-type VP1, wild-type VP2, and/or wild-type VP3 capsid proteins. In some embodiments, the serotype of the reference wild-type AAV capsid can be AAV-1, AAV-2, AAV-3, AAV-4, AAV-5, AAV-6, AAV-8, AAV-9 or any combination thereof. In some embodiments, the serotype of the wild-type AAV capsid can be AAV-9. The engineered AAV capsids can have a different tropism than that of the reference wild-type AAV capsid.

[0290] The engineered AAV capsid can contain 1-60 engineered capsid proteins. In some embodiments, the engineered AAV capsids can contain 1, 2, 3, 4, 5, 6, 7, 8, 9, 10, 11, 12, 13, 14, 15, 16, 17, 18, 19, 20, 21, 22, 23, 24, 25, 26, 27, 28, 29, 30, 31, 32, 33, 34, 35, 36, 37, 38, 39, 40, 41, 42, 43, 44, 45, 46, 47, 48, 49, 50, 51, 52, 53, 54, 55, 56, 57, 58, 59, or 60 engineered capsid proteins. In some embodiments, the engineered AAV capsid can contain 0-59 wild-type AAV capsid proteins. In some embodiments, the engineered AAV capsid can contain 0, 1, 2, 3, 4, 5, 6, 7, 8, 9, 10, 11, 12, 13, 14, 15, 16, 17, 18, 19, 20, 21, 22, 23, 24, 25, 26, 27, 28, 29, 30, 31, 32, 33, 34, 35, 36, 37, 38, 39, 40, 41, 42, 43, 44, 45, 46, 47, 48, 49, 50, 51, 52, 53, 54, 55, 56, 57, 58, or 59 wild-type AAV capsid proteins.

[0291] In some embodiments, the engineered AAV capsid protein can have an n-mer amino acid insert (also referred to herein as an “n-mer insert”), where n can be at least 3 amino acids. In some embodiments, n can be 3, 4, 5, 6, 7, 8, 9, 10, 11, 12, 13, 14, 15, 16, 17, 18, 19, 20, 21, 22, 23, 24, or 25 amino acids. In some embodiments, the engineered AAV capsid can have a 6-mer or 7-mer amino acid insert. In some embodiments, the n-mer amino acid inset can be inserted between two amino acids in the wild-type viral protein (VP) (or capsid protein). In some embodiments, the n-mer insert can be inserted between two amino acids in a variable amino acid region in an AAV capsid protein. The core of each wild-type AAV viral protein contains an eight-stranded beta-barrel motif (betaB to betaI) and an alpha-helix (alphaA) that are conserved in autonomous parovirus capsids (see e.g., DiMattia et al. 2012. J. Virol. 86(12):6947-6958). Structural variable regions (VRs) occur in the surface loops that connect the beta-strands, which cluster to produce local variations in the capsid surface. AAVs have 12 variable regions (also referred to as hypervariable regions) (see e.g., Weitzman and Linden. 2011. “Adeno-Associated Virus Biology.” In Snyder, R. O., Moullier, P. (eds.) Totowa, NJ: Humana Press). In some embodiments, one or more n-mer inserts can be inserted between two amino acids in one or more of the 12 variable regions in the wild-type AVV capsid proteins. In some embodiments, the one or more n-mer inserts can be each be inserted between two amino acids in VR-I, VR-II, VR-III, VR-IV, VR-V, VR-VI, VR-VII, VR-III, VR-IX, VR-X, VR-XI, VR-XII, or a combination thereof. In some embodiments, the n-mer insert(s) can be inserted between two amino acids in the VR-III of a capsid protein. In some embodiments, the engineered capsid can have an n-mer insert inserted between any two contiguous amino acids between amino acids 262 and 269, between any two contiguous amino acids between amino acids 327 and 332, between any two contiguous amino acids between amino acids 382 and 386, between any two contiguous amino acids between amino acids 452 and 460, between any two contiguous amino acids between amino acids 488 and 505, between any two contiguous amino acids between amino acids 545 and 558, between any two contiguous amino acids between amino acids 581 and 593, between any two contiguous amino acids between amino acids 704 and 714 of an AAV9 viral protein. In some embodiments, the engineered capsid can have an n-mer insert inserted between amino acids 588 and 589 of an AAV9 viral protein. In some embodiments, the engineered capsid can have an n-mer insert inserted between amino acids 588 and 589 of an AAV9 viral protein. In some embodiments, the engineered capsid can have an n-mer insert inserted between amino acids 588 and 589 of an AAV9 viral protein. SEQ ID NO: 1 is a reference AAV9 capsid sequence for at least referencing the insertion sites discussed above. It will be appreciated that n-mer insert(s) can be inserted in analogous positions in AAV viral proteins of other serotypes. In some embodiments as previously discussed, the n-mer insert(s) can be inserted between any two contiguous amino acids within the AAV viral protein and in some embodiments the insertion is made in a variable region.

[0292] In certain example embodiments, one or more of the n-mer motifs are incorporated into the viral protein such that at least one of the one or more RGD motifs, at least one of the one or more P motifs, or both is/are located between two amino acids of the viral protein such that at least one of the one or more RGD motifs and/or one or more P-motifs is external to a viral capsid (e.g., an AAV viral capsid).

[0293] In certain example embodiments, one or more of the one or more n-mer inserts are incorporated into the AAV protein such that one or more of the one more RGD motifs and/or one or more of the one or more P motifs are each inserted between any two contiguous amino acids between amino acids independently selected from 262-269, 327-332, 382-386, 452-460, 488-505, 527-539, 545-558, 581-593, 598-599, 704-714, or any combination thereof in an AAV9 capsid polypeptide or in an analogous position in an AAV1, AAV2, AAV3, AAV4, AAV5, AAV6, AAV7, AAV8, AAV rh.74, AAV rh.10 capsid polypeptide.

[0294] In certain example embodiments, at least one of the one or more n-mer inserts is incorporated into the AAV protein such that at least one of the one more RGD motifs and/or at least one of the one or more P motifs is inserted between amino acids 588 and 589 in an AAV9 capsid polypeptide or in an analogous position in an AAV1, AAV2, AAV3, AAV4, AAV5, AAV6, AAV7, AAV8, AAV rh.74, AAV rh.10 capsid polypeptide.

[0295] In certain example embodiments, at least one of the one or more n-mer inserts is incorporated into the AAV protein such that at least one of the one more RGD motifs and/or at least one of the one or more P motifs is inserted between amino acids 598-599 in an AAV9 capsid polypeptide or in an analogous position in an AAV1, AAV2, AAV3, AAV4, AAV5, AAV6, AAV7, AAV8, AAV rh.74, AAV rh.10 capsid polypeptide.

AAV9 capsid (wild-type) reference Sequence:
SEQ ID NO: 1
MAADGYLPDWLEDNLSEGIREWWALKPGAPQPKANQQHQDNARGLVLPGY
KYLGPGNGLDKGEPVNAADAAALEHDKAYDQQLKAGDNPYLKYNHADAEF
QERLKEDTSFGGNLGRAVFQAKKRLLEPLGLVEEAAKTAPGKKRPVEQSP
QEPDSSAGIGKSGAQPAKKRLNFGQTGDTESVPDPQPIGEPPAAPSGVGS
LTMASGGGAPVADNNEGADGVGSSSGNWHCDSQWLGDRVITTSTRTWALP
TYNNHLYKQISNSTSGGSSNDNAYFGYSTPWGYFDFNRFHCHFSPRDWQR
LINNNWGFRPKRLNFKLFNIQVKEVTDNNGVKTIANNLTSTVQVFTDSDY
QLPYVLGSAHEGCLPPFPADVFMIPQYGYLTLNDGSQAVGRSSFYCLEYF
PSQMLRTGNNFQFSYEFENVPFHSSYAHSQSLDRLMNPLIDQYLYYLSKT
INGSGQNQQTLKFSVAGPSNMAVQGRNYIPGPSYRQQRVSTTVTQNNNSE
FAWPGASSWALNGRNSLMNPGPAMASHKEGEDRFFPLSGSLIFGKQGTGR
DNVDADKVMITNEEEIKTTNPVATESYGQVATNHQSAQAQAQTGWVQNQG
ILPGMVWQDRDVYLQGPIWAKIPHTDGNFHPSPLMGGFGMKHPPPQILIK
NTPVPADPPTAFNKDKLNSFITQYSTGQVSVEIEWELQKENSKRWNPEIQ
YTSNYYKSNNVEFAVNTEGVYSEPRPIGTRYLTRNL

[0296] In some embodiments, an AAV capsid can contain one or more targeting moieties having one or more n-mer inserts that contain a P-motif, an RGD motif or both. P-motifs and RGD motifs are described in greater detail elsewhere herein. In some embodiments, an AAV capsid can contain one or more targeting moieties having one or more n-mer inserts that are each immediately preceded by AQ or DG. In some embodiments, the n-mer insert in an AAV capsid, such as an CNS-muscle specific or muscle specific AAV capsid, can be or include one or more RGD motifs and/or P motifs as in any one or more as set forth in Tables 4, 5, 6, 7, 8, 9, 10, 11, or any combination thereof. In some embodiments, insertion of the n-mer insert in an AAV capsid can result in cell, tissue, organ, specific engineered AAV capsids. In some embodiments, the engineered viral protein, engineered viral capsid protein, engineered viral capsid, and/or engineered viral particle can have a specificity for muscle cells (e.g., cardiac and/or skeletal muscle cells). In some embodiments, the engineered viral protein, engineered viral capsid protein, engineered viral capsid, and/or engineered viral particle can have a specificity for both muscle cells and CNS cells and/or tissue. In some embodiments, the engineered viral protein, engineered viral capsid protein, engineered viral capsid, and/or engineered viral particle can have a specificity for both cardiac muscle cells and CNS cells and/or tissue. In some embodiments, the engineered viral protein, engineered viral capsid protein, engineered viral capsid, and/or engineered viral particle can have a specificity for both skeletal muscle cells and CNS cells and/or tissue. In some embodiments, the engineered viral protein, engineered viral capsid protein, engineered viral capsid, and/or engineered viral particle can have a specificity for muscle cells and/or tissue. In some embodiments, the engineered viral protein, engineered viral capsid protein, engineered viral capsid, and/or engineered viral particle can have a specificity for cardiac muscle cells and/or tissue. In some embodiments, the engineered viral protein, engineered viral capsid protein, engineered viral capsid, and/or engineered viral particle can have a specificity for skeletal muscle cells and/or tissue.

[0297] In some embodiments, the CNS-muscle specific or muscle specific AAV capsid contains an RGD insert and/or a P-motif. In some embodiments, the CNS-muscle specific or muscle specific AAV capsid does not contain an RGD insert. In some embodiments, the CNS-muscle specific or muscle specific AAV capsid does not contain a P-motif P-motifs and RGD motifs are described in greater detail elsewhere herein.

[0298] In some embodiments, the n-mer insert(s) include one or more “P motifs” and/or one or more RGD motifs. In some embodiments, the P-motif comprises or consists of the amino acid sequence XₘPX₁QGTX₂RXₙ (SEQ ID NO: 1699), wherein X₁, X₂, Xₘ, and Xₙ are each independently selected from any amino acid, wherein m is 0, 1, 2, or 3, and wherein n is 0, 1, 2, 3, 4, 5, 6, or 7. In some embodiments, the P-motif has the amino acid sequence PX₁QGTX₂RXₙ (SEQ ID NO: 1699), where X₁, X₂, Xₙ, are each selected from any amino acid and where n is 0, 1, 2, 3, 4, 5, 6, or 7. Exemplary P-motifs are described in greater detail elsewhere herein. In some embodiments, at least one of the RGD motifs comprises or consists of XₘRGDXₙ, wherein m is 0-4 amino acids, wherein n is 0-15 amino acids, and wherein Xₘ, and X₁ are each independently selected from any amino acid. In some embodiments, X₁ is S, T, or A. In some embodiments, X₂ is L, V, F, or I. In some embodiments, X₁ is S, T, or A and X₂ is L, V, F, or I. Exemplary, non-limiting P motifs are shown at least in e.g., Tables 8, 10, 9, and/or 11. Exemplary, non-limiting P motifs are shown at least in e.g., Tables 8, 10, 9, and/or 11. Exemplary, non-limiting P motifs are shown at least in e.g., Tables 4-11 or any combination thereof. Exemplary non-limiting RGD motifs are shown in at least Tables 4, 5, 6, 7, 10, and/or 11. In some embodiments, one or more n-mer inserts that can be or include a P-motif and/or RGD motif as set forth in any one or more of Tables 4, 5, 6, 7, 8, 9, 10, 11, or any combination thereof can be included in a CNS-muscle specific or a muscle specific engineered capsid.

[0299] In some embodiments, the n-mer insert (such as a 7-mer insert) can be inserted into an AAV vector between two contiguous amino acids where the amino acids in the AAV vector immediately preceding the n-mer insert can be DG or AQ. In some embodiments, the DG or AQ are the amino acids immediately preceding the n-mer insert in the capsid protein when the n-mer insert is included in a capsid polypeptide, particularly an AAV capsid polypeptide. Without being bound by theory, inserts including a DG or AQ at the C terminal end or are inserted into a capsid polypeptide, such as an AAV capsid polypeptide, such that the insert(s) are immediately following an AQ or DG of the capsid polypeptide, may be able to transduce more hosts, such as more strains or species. In some embodiments, amino acids 587 and 588 of the AAV or analogous amino acids thereto are DG. In some embodiments, amino acids 587 and 588 of the AAV or analogous amino acids thereto are AQ. In some embodiments, amino acids 587 and 588 of the AAV or analogous amino acids thereto are AQ and are followed by an n-mer insert. In some embodiments, amino acids 587 and 588 of the AAV or analogous amino acids thereto are DG and are followed by an n-mer insert.

[0300] In some embodiments, the n-mer insert is such that when included in a host polypeptide (e.g., viral or AAV protein, such as a capsid protein) one or more residues of the host polypeptide are replaced with one or more of that from the n-mer insert. In some embodiments, when a C terminal AQ or DG are included in the n-mer insert but are not part of a P or RGD motif, the AQ or DG can optionally replace 1 or 2 amino acid residues immediately preceding where the P or RGD motif is to be inserted. For example, in some embodiments, where the RGD or P motif is desired to be inserted between e.g., 588 and 589 in an AAV9 or position analogous thereto in other AAVs, the n-mer insert can contain e.g., [AQ or DG]-[P or RGD motif]-Xₙ or Xₘ, where Xₙ or Xₘ is as described elsewhere herein with respect to the P and RGD motifs, respectively, where AQ or DG replaces residues 587 and 588 of the AAV9 or position analogous thereto in other AAVs leaving the P or RGD motif to be effectively inserted between positions 588 and 589 of the AAV9 or position analogous thereto in other AAVs. It will be appreciated that such an approach can be extrapolated to other host polypeptides besides AAVs as well as other positions within AAVs. Further this can be extrapolated to other C-terminal amino acids besides AQ or DG as the case may be (e.g., Xₘ in the context of P motifs).

[0301] In some embodiments, the AAV or other viral capsids are both CNS and muscle specific. In some embodiments, the AAV or other viral capsids are muscle specific. In some embodiments, the AAV or other viral capsids is skeletal muscle specific and/or cardiac muscle specific. In some embodiments, the muscle (e.g., skeletal and/or cardiac muscle) specificity of the engineered AAV or other viral capsid is conferred by a muscle (e.g., skeletal and/or cardiac muscle) specific n-mer insert incorporated in the engineered AAV or other viral capsid. In some embodiments, the dual CNS-muscle (e.g., CNS and muscle) specificity of the engineered AAV or other viral capsid is conferred by a CNS-muscle specific n-mer insert incorporated in the engineered AAV or other viral capsid. While not intending to be bound by theory, it is believed that the n-mer insert confers a 3D structure to or within a domain or region of the engineered AAV or other viral capsid such that the interaction of an engineered AAV containing said engineered AAV or other viral capsid has increased or improved interactions (e.g., increased affinity) with a cell surface receptor and/or other molecule on the surface of a muscle cell (e.g., a cardiac cell and/or skeletal muscle cell) or both a CNS cell and a muscle cell (e.g., a cardiac muscle and/or skeletal muscle cell). In some embodiments the cell surface receptor is AAV receptor (AAVR). In some embodiments, the cell surface receptor is a muscle (e.g., a cardiac muscle cell and/or skeletal muscle cell) cell specific AAV receptor. In some embodiments, the cell surface receptor is a CNS cell and a muscle (e.g., a cardiac muscle cell and/or skeletal muscle cell) cell specific AAV receptor. In some embodiments, a CNS-muscle specific or a muscle specific (e.g. a cardiac muscle and/or skeletal muscle) engineered AAV containing the CNS-muscle specific or muscle (e.g., cardiac and/or skeletal) specific capsid can have an increased transduction rate, efficiency, amount, or a combination thereof in a CNS and/or a muscle (e.g., a cardiac or skeletal muscle) cell as compared to other cell types and/or other AAVs or other viruses that do not contain a muscle-specific engineered AAV or other viral capsid as described herein.

[0302] Also described herein are polynucleotides that encode the engineered targeting moieties, viral proteins (e.g., capsid proteins), and other polypeptides described herein, including but not limited to, the engineered AAV or other viral capsids described herein. In some embodiments, the engineered AAV or other viral capsid encoding polynucleotide can be included in a polynucleotide that is configured to be an AAV or other viral genome donor in an AAV or other viral vector system that can be used to generate engineered AAV or other viral particles described elsewhere herein.

[0303] In some embodiments the engineered viral (e.g., AAV) capsid encoding polynucleotide can be operably coupled to a poly adenylation tail. In some embodiments, the poly adenylation tail can be an SV40 poly adenylation tail. In some embodiments, the viral (e.g., AAV) capsid encoding polynucleotide can be operably coupled to a promoter. In some embodiments, the promoter can be a tissue specific promoter. In some embodiments, the tissue specific promoter is specific for muscle (e.g., cardiac, skeletal, and/or smooth muscle), neurons and supporting cells (e.g., astrocytes, glial cells, Schwann cells, etc.) and combinations thereof. In some embodiments the promoter can be a constitutive promoter. Suitable tissue specific promoters and constitutive promoters are discussed elsewhere herein and are generally known in the art and can be commercially available.

[0304] Suitable muscle tissue/cell specific promoters include, but are not limited to CK8, MHCK7, Myoglobin promoter (Mb), Desmin promoter, muscle creatine kinase promoter (MCK) and variants thereof, and SPc5-12 synthetic promoter.

[0305] Suitable neuronal tissue/cell specific promoters include, but are not limited to, GFAP promoter (astrocytes), SYN1 promoter (neurons), and NSE/RU5′ (mature neurons).

[0306] Other suitable CNS specific promoters can include, but are not limited to, neuroactive peptide cholecystokinin (CCK) (see e.g., Chhatawl et al. Gene Therapy volume 14, pages575-583(2007)), a brain specific DNA MiniPromoter (such as any of those identified for brain or pan-neronal expression as in de Leeuw et al. Mol. Therapy. 1(5): 2014. doi:10.1038/mtm.2013.5), myelin basic promoter (MBP) (see e.g., von Jonquieres, G., Mersmann, N., Klugmann, C. B., Harasta, A. E., Lutz, B., Teahan, O., et al. (2013). Glial promoter selectivity following AAV-delivery to the immature brain. PLoS One 8 (6), e65646. doi: 10.1371/journal.pone.0065646), glial fibrillary acid protein (GFAP) for expression in astrocytes (see e.g., Smith-Arica, J. R., Morelli, A. E., Larregina, A. T., Smith, J., Lowenstein, P. R., Castro, M. G. (2000). Cell-type-specific and regulatable transgenesis in the adult brain: adenovirus-encoded combined transcriptional targeting and inducible transgene expression. Mol. Ther. 2 (6), 579-587. doi: 10.1006/mthe.2000.0215 and Lee, Y., Messing, A., Su, M., Brenner, M. (2008). GFAP promoter elements required for region-specific and astrocyte-specific expression. Glia 56 (5), 481-493. doi: 10.1002/glia.20622), human myelin associated glycoprotein promoter (full-length or truncated) (see e.g., von Jonquieres, G., Frohlich, D., Klugmann, C. B., Wen, X., Harasta, A. E., Ramkumar, R., et al. (2016). Recombinant human myelin-associated glycoprotein promoter drives selective AAV-mediated transgene expression in oligodendrocytes. Front. Mol. Neurosci. 9, 13. doi: 10.3389/fnmol.2016.00013), F4/80 promoter (see e.g., Rosario, A. M., Cruz, P. E., Ceballos-Diaz, C., Strickland, M. R., Siemienski, Z., Pardo, M., et al. (2016). Microglia-specific targeting by novel capsid-modified AAV6 vectors. Mol. Ther. Methods Clin. Dev. 3, 16026. doi: 10.1038/mtm.2016.26), phosphate-activated glutaminase (PAG) or the vesicular glutamate transporter (vGLUT) promoter (for about 90% glutamatergic neuron-specific expression) (see e.g., Rasmussen, M., Kong, L., Zhang, G. R., Liu, M., Wang, X., Szabo, G., et al. (2007). Glutamatergic or GABAergic neuron-specific, long-term expression in neocortical neurons from helper virus-free HSV-1 vectors containing the phosphate-activated glutaminase, vesicular glutamate transporter-1, or glutamic acid decarboxylase promoter. Brain Res. 1144, 19-32. doi: 10.1016/j.brainres.2007.01.125), glutamic acid decarboxylase (GAD) promoter (for about 90% GABAergic neuron-specific expression) (see e.g., Rasmussen, M., Kong, L., Zhang, G. R., Liu, M., Wang, X., Szabo, G., et al. (2007). Glutamatergic or GABAergic neuron-specific, long-term expression in neocortical neurons from helper virus-free HSV-1 vectors containing the phosphate-activated glutaminase, vesicular glutamate transporter-1, or glutamic acid decarboxylase promoter. Brain Res. 1144, 19-32. doi: 10.1016/j.brainres.2007.01.125), MeCP2 promoter (see e.g., Gray et al. Hum Gene Ther. 2011 September; 22(9):1143-53. doi: 10.1089/hum.2010.245), and retinoblastoma gene promoter (see e.g., Jiang et al., J. Biol. Chem. 2001. 276, 593-600).

[0307] Suitable constitutive promoters include, but are not limited to CMV, RSV, SV40, EF1alpha, CAG, and beta-actin.

AAVs with Reduced Non-CNS and/or Non-Muscle Cell Specificity

[0308] In some embodiments, the n-mer insert(s), RGD motifs, and/or P-motif(s) are inserted into an AAV protein (e.g., an AAV capsid protein) that has reduced specificity (or no detectable, measurable, or clinically relevant interaction) for one or more non-CNS cell and/or non-muscle (e.g., skeletal muscle and/or cardiac muscle) cell types. Exemplary non-CNS and/or non-muscle (e.g., skeletal muscle and/or cardiac muscle) cell types include, but are not limited to, liver, kidney, lung, heart, spleen, muscle (skeletal and cardiac), bone, immune, stomach, intestine, eye, skin cells and the like. In some embodiments, the non-CNS and/or non-muscle (e.g., skeletal muscle and/or cardiac muscle) cells are liver cells.

[0309] In certain example embodiments, the AAV capsid protein is an engineered AAV capsid protein having reduced or eliminated uptake in a non-CNS and/or non-muscle (e.g., skeletal muscle and/or cardiac muscle) cell as compared to a corresponding wild-type AAV capsid polypeptide.

[0310] In certain example embodiments, the non-CNS and/or non-muscle (e.g., skeletal muscle and/or cardiac muscle) cell is a liver cell.

[0311] In certain example embodiments, the wild-type capsid polypeptide is an AAV1, AAV2, AAV3, AAV4, AAV5, AAV6, AAV7, AAV8, AAV9, AAV rh.74, or AAV rh.10 capsid polypeptide.

[0312] In certain example embodiments, the engineered AAV capsid protein comprises one or more mutations that result in reduced or eliminated uptake in a non-CNS and/or non-muscle (e.g., skeletal muscle and/or cardiac muscle) cell.

[0313] In certain example embodiments, the one or more mutations are in position 267, in position 269, in position 504, in position 505, in position 590, or any combination thereof in the AAV9 capsid protein (SEQ ID NO: 1) or in one or more positions corresponding thereto in a non-AAV9 capsid polypeptide.

[0314] In certain example embodiments, the non-AAV9 capsid protein is an AAV1, AAV2, AAV3, AAV4, AAV5, AAV6, AAV7, AAV8, AAV rh.74, or AAV rh.10 capsid polypeptide.

[0315] In certain example embodiments, the mutation in position 267 in the AAV9 capsid protein (SEQ ID NO: 1) or position corresponding thereto in a non-AAV9 capsid polypeptide is a G or X mutation to A, wherein X is any amino acid.

[0316] In certain example embodiments, the mutation in position 269 in the AAV9 capsid protein (SEQ ID NO: 1) or position corresponding thereto in a non-AAV9 capsid polypeptide is an S or X to T mutation, wherein X is any amino acid.

[0317] In certain example embodiments, the mutation in position 504 in the AAV9 capsid protein (SEQ ID NO: 1) or position corresponding thereto in a non-AAV9 capsid polypeptide is a G or X to A mutation, wherein X is any amino acid.

[0318] In certain example embodiments, the mutation in position 505 in the AAV9 capsid protein (SEQ ID NO: 1) or position corresponding thereto in a non-AAV9 capsid polypeptide is a P or X to A mutation, wherein X is any amino acid.

[0319] In certain example embodiments, the mutation in position 590 in the AAV9 capsid protein (SEQ ID NO: 1) or position corresponding thereto in a non-AAV9 capsid polypeptide is a Q or X to A mutation, wherein X is any amino acid.

[0320] In certain example embodiments, the engineered AAV capsid protein is an engineered AAV9 capsid polypeptide comprising a mutation at position 267, position 269 or both of a wild-type AAV9 capsid protein (SEQ ID NO: 1), wherein the mutation at position 267 is a G to A mutation and wherein the mutation at position 269 is an S to T mutation.

[0321] In certain example embodiments, the engineered AAV capsid protein is an engineered AAV9 capsid polypeptide comprising a mutation at position 590 of a wild-type AAV9 capsid protein (SEQ ID NO: 1), wherein the mutation at position 509 is a Q to A mutation.

[0322] In certain example embodiments, the engineered AAV capsid protein is an engineered AAV9 capsid polypeptide comprising a mutation at position 504, position 505, or both of a wild-type AAV9 capsid protein (SEQ ID NO: 1), wherein the mutation at position 504 is a G to A mutation and wherein the mutation at position 505 is a P to A mutation.

[0323] In some embodiments, the AAV capsid protein in which the n-mer insert(s) and/or P motif(s) can be inserted can be 80-100 (e.g., 80, 81, 82, 83, 84, 85, 86, 87, 88, 89, 90, 91, 92, 93, 94, 95, 96, 97, 98, 99, to/or 100) percent identical to SEQ ID NO: 4 or SEQ ID NO: 5 of International Patent Application Publication WO 2019/217911, which is incorporated by reference as if expressed in its entirety herein. These sequences are also incorporated herein as SEQ ID NOS: 2 and 3 respectively. It will be appreciated that when considering variants of these AAV9 capsid proteins with reduced liver specificity, that residues 267 and/or 269 must contain the relevant mutations or equivalents.

AAV9_G267A
SEQ ID NO: 2:
Met Ala Ala Asp Gly Tyr Leu Pro Asp Trp Leu Glu Asp Asn Leu Ser
Glu Gly Ile Arg Glu Trp Trp Ala Leu Lys Pro Gly Ala Pro Gln Pro
Lys Ala Asn Gln Gln His Gln Asp Asn Ala Arg Gly Leu Val Leu Pro
Gly Tyr Lys Val Leu Gly Pro Gly Asn Gly Leu Asp Lys Gly Glu Pro
Val Asn Ala Ala Asp Ala Ala Ala Leu Glu His Asp Lys Ala Tyr Asp
Gln Gln Leu Lys Ala Gly Asp Asn Pro Tyr Leu Lys Tyr Asn His Ala
Asp Ala Glu Phe Gln Glu Arg Leu Lys Glu Asp Thr Ser Phe Gly Gly
Asn Leu Gly Arg Ala Val Phe Gln Ala Lys Lys Arg Leu Leu Glu Pro
Leu Gly Leu Val Glu Glu Ala Ala Lys Thr Ala Pro Gly Lys Lys Arg
Pro Val Glu Gln Ser Pro Gln Glu Pro Asp Ser Ser Ala Gly Ile Gly
Lys Ser Gly Ala Gln Pro Ala Lys Lys Arg Leu Asn Phe Gly Gln Thr
Gly Asp Thr Glu Ser Val Pro Asp Pro Gln Pro Ile Gly Glu Pro Pro
Ala Ala Pro Ser Gly Val Gly Ser Leu Thr Met Ala Ser Gly Gly Gly
Ala Pro Val Ala Asp Asn Asn Glu Gly Ala Asp Gly Val Gly Ser Ser
Ser Gly Asn Trp His Cys Asp Ser Gln Trp Leu Gly Asp Arg Val Ile
Thr Thr Ser Thr Arg Thr Trp Ala Leu Pro Thr Tyr Asn Asn His Leu
Tyr Lys Gln Ile Ser Asn Ser Thr Ser Gly Ala Ser Ser Asn Asp Asn
Ala Tyr Phe Gly Tyr Ser Thr Pro Trp Gly Tyr Phe Asp Phe Asn Arg
Phe His Cys His Phe Ser Pro Arg Asp Trp Gln Arg Leu Ile Asn Asn
Asn Trp Gly Phe Arg Pro Lys Arg Leu Asn Phe Lys Leu Phe Asn Ile
Gln Val Lys Glu Val Thr Asp Asn Asn Gly Val Lys Thr Ile Ala Asn
Asn Leu Thr Ser Thr Val Gln Val Phe Thr Asp Ser Asp Tyr Gln Leu
Pro Tyr Val Leu Gly Ser Ala His Glu Gly Cys Leu Pro Pro Phe Pro
Ala Asp Val Phe Met Ile Pro Gln Tyr Gly Tyr Leu Thr Leu Asn Asp
Gly Ser Gln Ala Val Gly Arg Ser Ser Phe Tyr Cys Leu Glu Tyr Phe
Pro Ser Gln Met Leu Arg Thr Gly Asn Asn Phe Gln Phe Ser Tyr Glu
Phe Glu Asn Val Pro Phe His Ser Ser Tyr Ala His Ser Gln Ser Leu
Asp Arg Leu Met Asn Pro Leu Ile Asp Gln Tyr Leu Tyr Tyr Leu Ser
Lys Thr Ile Asn Gly Ser Gly Gln Asn Gln Gln Thr Leu Lys Phe Ser
Val Ala Gly Pro Ser Asn Met Ala Val Gln Gly Arg Asn Tyr Ile Pro
Gly Pro Ser Tyr Arg Gln Gln Arg Val Ser Thr Thr Val Thr Gln Asn
Asn Asn Ser Glu Phe Ala Trp Pro Gly Ala Ser Ser Trp Ala Leu Asn
Gly Arg Asn Ser Leu Met Asn Pro Gly Pro Ala Met Ala Ser His Lys
Glu Gly Glu Asp Arg Phe Phe Pro Leu Ser Gly Ser Leu Ile Phe Gly
Lys Gln Gly Thr Gly Arg Asp Asn Val Asp Ala Asp Lys Val Met Ile
Thr Asn Glu Glu Glu Ile Lys Thr Thr Asn Pro Val Ala Thr Glu Ser
Tyr Gly Gln Val Ala Thr Asn His Gln Ser Ala Gln Ala Gln Ala Gln
Thr Gly Trp Val Gln Asn Gln Gly Ile Leu Pro Gly Met Val Trp Gln
Asp Arg Asp Val Tyr Leu Gln Gly Pro Ile Trp Ala Lys Ile Pro His
Thr Asp Gly Asn Phe His Pro Ser Pro Leu Met Gly Gly Phe Gly Met
Lys His Pro Pro Pro Gln Ile Leu Ile Lys Asn Thr Pro Val Pro Ala
Asp Pro Pro Thr Ala Phe Asn Lys Asp Lys Leu Asn Ser Phe Ile Thr
Gln Tyr Ser Thr Gly Gln Val Ser Val Glu Ile Glu Trp Glu Leu Gln
Lys Glu Asn Ser Lys Arg Trp Asn Pro Glu Ile Gln Tyr Thr Ser Asn
Tyr Tyr Lys Ser Asn Asn Val Glu Phe Ala Val Asn Thr Glu Gly Val
Tyr Ser Glu Pro Arg Pro Ile Gly Thr Arg Tyr Leu Thr Arg Asn Leu
AAV9_G267A, S269T
SEQ ID NO: 3:
Met Ala Ala Asp Gly Tyr Leu Pro Asp Trp Leu Glu Asp Asn Leu Ser
Glu Gly Ile Arg Glu Trp Trp Ala Leu Lys Pro Gly Ala Pro Gln Pro
Lys Ala Asn Gln Gln His Gln Asp Asn Ala Arg Gly Leu Val Leu Pro
Gly Tyr Lys Val Leu Gly Pro Gly Asn Gly Leu Asp Lys Gly Glu Pro
Val Asn Ala Ala Asp Ala Ala Ala Leu Glu His Asp Lys Ala Tyr Asp
Gln Gln Leu Lys Ala Gly Asp Asn Pro Tyr Leu Lys Tyr Asn His Ala
Asp Ala Glu Phe Gln Glu Arg Leu Lys Glu Asp Thr Ser Phe Gly Gly
Asn Leu Gly Arg Ala Val Phe Gln Ala Lys Lys Arg Leu Leu Glu Pro
Leu Gly Leu Val Glu Glu Ala Ala Lys Thr Ala Pro Gly Lys Lys Arg
Pro Val Glu Gln Ser Pro Gln Glu Pro Asp Ser Ser Ala Gly Ile Gly
Lys Ser Gly Ala Gln Pro Ala Lys Lys Arg Leu Asn Phe Gly Gln Thr
Gly Asp Thr Glu Ser Val Pro Asp Pro Gln Pro Ile Gly Glu Pro Pro
Ala Ala Pro Ser Gly Val Gly Ser Leu Thr Met Ala Ser Gly Gly Gly
Ala Pro Val Ala Asp Asn Asn Glu Gly Ala Asp Gly Val Gly Ser Ser
Ser Gly Asn Trp His Cys Asp Ser Gln Trp Leu Gly Asp Arg Val Ile
Thr Thr Ser Thr Arg Thr Trp Ala Leu Pro Thr Tyr Asn Asn His Leu
Tyr Lys Gln Ile Ser Asn Ser Thr Ser Gly Ala Ser Thr Asn Asp Asn
Ala Tyr Phe Gly Tyr Ser Thr Pro Trp Gly Tyr Phe Asp Phe Asn Arg
Phe His Cys His Phe Ser Pro Arg Asp Trp Gln Arg Leu Ile Asn Asn
Asn Trp Gly Phe Arg Pro Lys Arg Leu Asn Phe Lys Leu Phe Asn Ile
Gln Val Lys Glu Val Thr Asp Asn Asn Gly Val Lys Thr Ile Ala Asn
Asn Leu Thr Ser Thr Val Gln Val Phe Thr Asp Ser Asp Tyr Gln Leu
Pro Tyr Val Leu Gly Ser Ala His Glu Gly Cys Leu Pro Pro Phe Pro
Ala Asp Val Phe Met Ile Pro Gln Tyr Gly Tyr Leu Thr Leu Asn Asp
Gly Ser Gln Ala Val Gly Arg Ser Ser Phe Tyr Cys Leu Glu Tyr Phe
Pro Ser Gln Met Leu Arg Thr Gly Asn Asn Phe Gln Phe Ser Tyr Glu
Phe Glu Asn Val Pro Phe His Ser Ser Tyr Ala His Ser Gln Ser Leu
Asp Arg Leu Met Asn Pro Leu Ile Asp Gln Tyr Leu Tyr Tyr Leu Ser
Lys Thr Ile Asn Gly Ser Gly Gln Asn Gln Gln Thr Leu Lys Phe Ser
Val Ala Gly Pro Ser Asn Met Ala Val Gln Gly Arg Asn Tyr Ile Pro
Gly Pro Ser Tyr Arg Gln Gln Arg Val Ser Thr Thr Val Thr Gln Asn
Asn Asn Ser Glu Phe Ala Trp Pro Gly Ala Ser Ser Trp Ala Leu Asn
Gly Arg Asn Ser Leu Met Asn Pro Gly Pro Ala Met Ala Ser His Lys
Glu Gly Glu Asp Arg Phe Phe Pro Leu Ser Gly Ser Leu Ile Phe Gly
Lys Gln Gly Thr Gly Arg Asp Asn Val Asp Ala Asp Lys Val Met Ile
Thr Asn Glu Glu Glu Ile Lys Thr Thr Asn Pro Val Ala Thr Glu Ser
Tyr Gly Gln Val Ala Thr Asn His Gln Ser Ala Gln Ala Gln Ala Gln
Thr Gly Trp Val Gln Asn Gln Gly Ile Leu Pro Gly Met Val Trp Gln
Asp Arg Asp Val Tyr Leu Gln Gly Pro Ile Trp Ala Lys Ile Pro His
Thr Asp Gly Asn Phe His Pro Ser Pro Leu Met Gly Gly Phe Gly Met
Lys His Pro Pro Pro Gln Ile Leu Ile Lys Asn Thr Pro Val Pro Ala
Asp Pro Pro Thr Ala Phe Asn Lys Asp Lys Leu Asn Ser Phe Ile Thr
Gln Tyr Ser Thr Gly Gln Val Ser Val Glu Ile Glu Trp Glu Leu Gln
Lys Glu Asn Ser Lys Arg Trp Asn Pro Glu Ile Gln Tyr Thr Ser Asn
Tyr Tyr Lys Ser Asn Asn Val Glu Phe Ala Val Asn Thr Glu Gly Val
Tyr Ser Glu Pro Arg Pro Ile Gly Thr Arg Tyr Leu Thr Arg Asn Leu

[0324] In some embodiments, the AAV capsid protein in which the in which the n-mer insert(s) can be inserted can be 80-100 (e.g., 80, 81, 82, 83, 84, 85, 86, 87, 88, 89, 90, 91, 92, 93, 94, 95, 96, 97, 98, 99, to/or 100) percent identical to any of those described in Adachi et al., (Nat. Comm. 2014. 5:3075, DOI: 10.1038/ncomms4075) that have reduced specificity for a non-CNS cell, particularly a liver cell. Adachi et al., (Nat. Comm. 2014. 5:3075, DOI: 10.1038/ncomms4075) is incorporated by reference herein as if expressed in its entirety.

[0325] In some embodiments, the modified AAV can have about a 1, 2, 3, 4, 5, 6, 7, 8, 9, 10, 11, 12, 13, 14, 15, 16, 17, 18, 19, 20, 21, 22, 23, 24, 25, 26, 27, 28, 29, 30, 31, 32, 33, 34, 35, 36, 37, 38, 39, 40, 41, 42, 43, 44, 45, 46, 47, 48, 49, 50, 51, 52, 53, 54, 55, 56, 57, 58, 59, 60, 61, 62, 63, 64, 65, 66, 67, 68, 69, 70, 71, 72, 73, 74, 75, 76, 77, 78, 79, 80, 81, 82, 83, 84, 85, 86, 87, 88, 89, 90, 91, 92, 93, 94, 95, 96, 97, 98, 99, 100 percent or fold reduction in specificity for a non-CNS cells as compared to a wild-type AAV or control. In some embodiments, the modified AAV can have no measurable or detectable uptake and/or expression in one or more non-CNS cells.

### Methods of Generating Engineered AAV Capsids

[0326] Also provided herein are methods of generating engineered AAV capsids. The engineered AAV capsid variants can be variants of wild-type AAV capsids. FIGS. 6A-8 can illustrate various embodiments of methods capable of generating engineered AAV capsids described herein. Generally, an AAV capsid library can be generated by expressing engineered capsid vectors each containing an engineered AAV capsid polynucleotide previously described in an appropriate AAV producer cell line. See e.g., FIG. 8. It will be appreciated that although FIG. 8 shows a helper-dependent method of AAV particle production, it will be appreciated that this can be done via a helper-free method as well. This can generate an AAV capsid library that can contain one more desired cell-specific engineered AAV capsid variant. As shown in FIG. 6 the AAV capsid library can be administered to various non-human animals for a first round of mRNA-based selection. As shown in FIG. 1, the transduction process by AAVs and related vectors can result in the production of an mRNA molecule that is reflective of the genome of the virus that transduced the cell. As is at least demonstrated in the Examples herein, mRNA based-selection can be more specific and effective to determine a virus particle capable of functionally transducing a cell because it is based on the functional product produced as opposed to just detecting the presence of a virus particle in the cell by measuring the presence of viral DNA.

[0327] After first-round administration, one or more engineered AAV virus particles having a desired capsid variant can then be used to form a filtered AAV capsid library. Desirable AAV virus particles can be identified by measuring the mRNA expression of the capsid variants and determining which variants are highly expressed in the desired cell type(s) as compared to non-desired cells type(s). Those that are highly expressed in the desired cell, tissue, and/or organ type are the desired AAV capsid variant particles. In some embodiments, the AAV capsid variant encoding polynucleotide is under control of a tissue-specific promoter that has selective activity in the desired cell, tissue, or organ.

[0328] The engineered AAV capsid variant particles identified from the first round can then be administered to various non-human animals. In some embodiments, the animals used in the second round of selection and identification are not the same as those animals used for first round selection and identification. Similar to round 1, after administration the top expressing variants in the desired cell, tissue, and/or organ type(s) can be identified by measuring viral mRNA expression in the cells. The top variants identified after round two can then be optionally barcoded and optionally pooled. In some embodiments, top variants from the second round can then be administered to a non-human primate to identify the top cell-specific variant(s), particularly if the end use for the top variant is in humans. Administration at each round can be systemic.

[0329] In some embodiments, the method of generating an AAV capsid variant can include the steps of: (a) expressing a vector system described herein that contains an engineered AAV capsid polynucleotide in a cell to produce engineered AAV virus particle capsid variants; (b) harvesting the engineered AAV virus particle capsid variants produced in step (a); (c) administering engineered AAV virus particle capsid variants to one or more first subjects, wherein the engineered AAV virus particle capsid variants are produced by expressing an engineered AAV capsid variant vector or system thereof in a cell and harvesting the engineered AAV virus particle capsid variants produced by the cell; and (d) identifying one or more engineered AAV capsid variants produced at a significantly high level by one or more specific cells or specific cell types in the one or more first subjects. In this context, “significantly high” can refer to a titer that can range from between about 2×10¹¹ to about 6×10¹² vector genomes per 15 cm dish.

[0330] The method can further include the steps of: (e) administering some or all engineered AAV virus particle capsid variants identified in step (d) to one or more second subjects; and (f) identifying one or more engineered AAV virus particle capsid variants produced at a significantly high level in one or more specific cells or specific cell types in the one or more second subjects. The cell in step (a) can be a prokaryotic cell or a eukaryotic cell. In some embodiments, the administration in step (c), step (e), or both is systemic. In some embodiments, one or more first subjects, one or more second subjects, or both, are non-human mammals. In some embodiments, one or more first subjects, one or more second subjects, or both, are each independently selected from the group consisting of: a wild-type non-human mammal, a humanized non-human mammal, a disease-specific non-human mammal model, and a non-human primate.

### Engineered Vectors and Vector Systems

[0331] Also provided herein are vectors and vector systems that can contain one or more of the engineered polynucleotides, (e.g., an AAV capsid polynucleotide) described herein. As used in this context, engineered viral (e.g., AAV) capsid polynucleotides refers to any one or more of the polynucleotides described herein capable of encoding an engineered viral (e.g., AAV) capsid as described elsewhere herein and/or polynucleotide(s) capable of encoding one or more engineered viral (e.g., AAV) capsid proteins described elsewhere herein. Further, where the vector includes an engineered viral (e.g., AAV) capsid polynucleotide described herein, the vector can also be referred to and considered an engineered vector or system thereof although not specifically noted as such. In embodiments, the vector can contain one or more polynucleotides encoding one or more elements of an engineered viral (e.g., AAV) capsid described herein. The vectors can be useful in producing bacterial, fungal, yeast, plant cells, animal cells, and transgenic animals that can express one or more components of the engineered viral (e.g., AAV) capsid described herein. Within the scope of this disclosure are vectors containing one or more of the polynucleotide sequences described herein. One or more of the polynucleotides that are part of the engineered viral (e.g., AAV) capsid and system thereof described herein can be included in a vector or vector system.

[0332] In some embodiments, the vector can include an engineered viral (e.g., AAV) capsid polynucleotide having a 3′ polyadenylation signal. In some embodiments, the 3′ polyadenylation is an SV40 polyadenylation signal. In some embodiments the vector does not have splice regulatory elements. In some embodiments, the vector includes one or more minimal splice regulatory elements. In some embodiments, the vector can further include a modified splice regulatory element, wherein the modification inactivates the splice regulatory element. In some embodiments, the modified splice regulatory element is a polynucleotide sequence sufficient to induce splicing, between a rep protein polynucleotide and the engineered viral (e.g., AAV) capsid protein variant polynucleotide. In some embodiments, the polynucleotide sequence can be sufficient to induce splicing is a splice acceptor or a splice donor. In some embodiments, the viral (e.g., AAV) capsid polynucleotide is an engineered viral (e.g., AAV) capsid polynucleotide as described elsewhere herein.

[0333] The vectors and/or vector systems can be used, for example, to express one or more of the engineered viral (e.g., AAV) capsid polynucleotides in a cell, such as a producer cell, to produce engineered viral (e.g., AAV) particles containing an engineered viral (e.g., AAV) capsid described elsewhere herein. Other uses for the vectors and vector systems described herein are also within the scope of this disclosure. In general, and throughout this specification, the term is a tool that allows or facilitates the transfer of an entity from one environment to another. In some contexts which will be appreciated by those of ordinary skill in the art, “vector” can be a term of art to refer to a nucleic acid molecule capable of transporting another nucleic acid to which it has been linked. A vector can be a replicon, such as a plasmid, phage, or cosmid, into which another DNA segment may be inserted so as to bring about the replication of the inserted segment. Generally, a vector is capable of replication when associated with the proper control elements.

[0334] Vectors include, but are not limited to, nucleic acid molecules that are single-stranded, double-stranded, or partially double-stranded; nucleic acid molecules that comprise one or more free ends, no free ends (e.g., circular); nucleic acid molecules that comprise DNA, RNA, or both; and other varieties of polynucleotides known in the art. One type of vector is a “plasmid,” which refers to a circular double stranded DNA loop into which additional DNA segments can be inserted, such as by standard molecular cloning techniques. Another type of vector is a viral vector, wherein virally-derived DNA or RNA sequences are present in the vector for packaging into a virus (e.g., retroviruses, replication defective retroviruses, adenoviruses, replication defective adenoviruses, and adeno-associated viruses (AAVs)). Viral vectors also include polynucleotides carried by a virus for transfection into a host cell. Certain vectors are capable of autonomous replication in a host cell into which they are introduced (e.g., bacterial vectors having a bacterial origin of replication and episomal mammalian vectors). Other vectors (e.g., non-episomal mammalian vectors) are integrated into the genome of a host cell upon introduction into the host cell, and thereby are replicated along with the host genome. Moreover, certain vectors are capable of directing the expression of genes to which they are operatively-linked. Such vectors are referred to herein as “expression vectors.” Common expression vectors of utility in recombinant DNA techniques are often in the form of plasmids.

[0335] Recombinant expression vectors can be composed of a nucleic acid (e.g., a polynucleotide) of the invention in a form suitable for expression of the nucleic acid in a host cell, which means that the recombinant expression vectors include one or more regulatory elements, which can be selected on the basis of the host cells to be used for expression, that is operatively-linked to the nucleic acid sequence to be expressed. Within a recombinant expression vector, “operably linked” and “operatively-linked” are used interchangeably herein and further defined elsewhere herein. In the context of a vector, the term “operably linked” is intended to mean that the nucleotide sequence of interest is linked to the regulatory element(s) in a manner that allows for expression of the nucleotide sequence (e.g., in an in vitro transcription/translation system or in a host cell when the vector is introduced into the host cell). Advantageous vectors include adeno-associated viruses, and types of such vectors can also be selected for targeting particular types of cells, such as those engineered viral (e.g., AAV) vectors containing an engineered viral (e.g., AAV) capsid polynucleotide with a desired cell-specific tropism. These and other embodiments of the vectors and vector systems are described elsewhere herein.

[0336] In some embodiments, the vector can be a bicistronic vector. In some embodiments, a bicistronic vector can be used for one or more elements of the engineered viral (e.g., AAV) capsid system described herein. In some embodiments, expression of elements of the engineered viral (e.g., AAV) capsid system described herein can be driven by a suitable constitutive or tissue specific promoter. Where the element of the engineered viral (e.g., AAV) capsid system is an RNA, its expression can be driven by a Pol III promoter, such as a U6 promoter. In some embodiments, the two are combined.

### Cell-Based Vector Amplification and Expression

[0337] Vectors can be designed for expression of one or more elements of the engineered targeting moieties, polypeptides, viral (e.g., AAV) capsid system described herein (e.g., nucleic acid transcripts, proteins, enzymes, and combinations thereof), etc. in a suitable host cell. In some embodiments, the suitable host cell is a prokaryotic cell. Suitable host cells include, but are not limited to, bacterial cells, yeast cells, insect cells, and mammalian cells. The vectors can be viral-based or non-viral based. In some embodiments, the suitable host cell is a eukaryotic cell. In some embodiments, the suitable host cell is a suitable bacterial cell. Suitable bacterial cells include, but are not limited to, bacterial cells from the bacteria of the species Escherichia coli. Many suitable strains of E. coli are known in the art for expression of vectors. These include, but are not limited to Pir1, Stbl2, Stbl3, Stbl4, TOP10, XL1 Blue, and XL10 Gold. In some embodiments, the host cell is a suitable insect cell. Suitable insect cells include those from Spodoptera frugiperda. Suitable strains of S. frugiperda cells include, but are not limited to, Sf9 and Sf21. In some embodiments, the host cell is a suitable yeast cell. In some embodiments, the yeast cell can be from Saccharomyces cerevisiae. In some embodiments, the host cell is a suitable mammalian cell. Many types of mammalian cells have been developed to express vectors. Suitable mammalian cells include, but are not limited to, HEK293, Chinese Hamster Ovary Cells (CHOs), mouse myeloma cells, HeLa, U2OS, A549, HT1080, CAD, P19, NIH 3T3, L929, N2a, MCF-7, Y79, SO-Rb50, HepG G2, DIKX-X11, J558L, Baby hamster kidney cells (BHK), and chicken embryo fibroblasts (CEFs). Suitable host cells are discussed further in Goeddel, GENE EXPRESSION TECHNOLOGY: METHODS IN ENZYMOLOGY 185, Academic Press, San Diego, Calif (1990).

[0338] In some embodiments, the vector can be a yeast expression vector. Examples of vectors for expression in yeast Saccharomyces cerevisiae include pYepSec1 (Baldari, et al., 1987. EMBO J. 6: 229-234), pMFa (Kuijan and Herskowitz, 1982. Cell 30: 933-943), pJRY88 (Schultz et al., 1987. Gene 54: 113-123), pYES2 (Invitrogen Corporation, San Diego, Calif), and picZ (InVitrogen Corp, San Diego, Calif). As used herein, a “yeast expression vector” refers to a nucleic acid that contains one or more sequences encoding an RNA and/or polypeptide and may further contain any desired elements that control the expression of the nucleic acid(s), as well as any elements that enable the replication and maintenance of the expression vector inside the yeast cell. Many suitable yeast expression vectors and features thereof are known in the art; for example, various vectors and techniques are illustrated in in Yeast Protocols, 2nd edition, Xiao, W., ed. (Humana Press, New York, 2007) and Buckholz, R. G. and Gleeson, M. A. (1991) Biotechnology (NY) 9(11): 1067-72. Yeast vectors can contain, without limitation, a centromeric (CEN) sequence, an autonomous replication sequence (ARS), a promoter, such as an RNA Polymerase III promoter, operably linked to a sequence or gene of interest, a terminator such as an RNA polymerase III terminator, an origin of replication, and a marker gene (e.g., auxotrophic, antibiotic, or other selectable markers). Examples of expression vectors for use in yeast may include plasmids, yeast artificial chromosomes, 2μ plasmids, yeast integrative plasmids, yeast replicative plasmids, shuttle vectors, and episomal plasmids.

[0339] In some embodiments, the vector is a baculovirus vector or expression vector and can be suitable for expression of polynucleotides and/or proteins in insect cells. Baculovirus vectors available for expression of proteins in cultured insect cells (e.g., SF9 cells) include the pAc series (Smith, et al., 1983. Mol. Cell. Biol. 3: 2156-2165) and the pVL series (Lucklow and Summers, 1989. Virology 170: 31-39). rAAV (recombinant Adeno-associated viral) vectors are preferably produced in insect cells, e.g., Spodoptera frugiperda Sf9 insect cells, grown in serum-free suspension culture. Serum-free insect cells can be purchased from commercial vendors, e.g., Sigma Aldrich (EX-CELL 405).

[0340] In some embodiments, the vector is a mammalian expression vector. In some embodiments, the mammalian expression vector is capable of expressing one or more polynucleotides and/or polypeptides in a mammalian cell. Examples of mammalian expression vectors include, but are not limited to, pCDM8 (Seed, 1987. Nature 329: 840) and pMT2PC (Kaufman, et al., 1987. EMBO J. 6: 187-195). The mammalian expression vector can include one or more suitable regulatory elements capable of controlling expression of the one or more polynucleotides and/or proteins in the mammalian cell. For example, commonly used promoters are derived from polyoma, adenovirus 2, cytomegalovirus, simian virus 40, and others disclosed herein and known in the art. More detail on suitable regulatory elements is described elsewhere herein.

[0341] For other suitable expression vectors and vector systems for both prokaryotic and eukaryotic cells see, e.g., Chapters 16 and 17 of Sambrook, et al., MOLECULAR CLONING: A LABORATORY MANUAL. 2nd ed., Cold Spring Harbor Laboratory, Cold Spring Harbor Laboratory Press, Cold Spring Harbor, N.Y., 1989.

[0342] In some embodiments, the recombinant mammalian expression vector is capable of directing expression of the nucleic acid preferentially in a particular cell type (e.g., tissue-specific regulatory elements are used to express the nucleic acid). Tissue-specific regulatory elements are known in the art. Non-limiting examples of suitable tissue-specific promoters include the albumin promoter (liver-specific; Pinkert, et al., 1987. Genes Dev. 1: 268-277), lymphoid-specific promoters (Calame and Eaton, 1988. Adv. Immunol. 43: 235-275), in particular promoters of T cell receptors (Winoto and Baltimore, 1989. EMIBO J. 8: 729-733) and immunoglobulins (Baneiji, et al., 1983. Cell 33: 729-740; Queen and Baltimore, 1983. Cell 33: 741-748), neuron-specific promoters (e.g., the neurofilament promoter; Byrne and Ruddle, 1989. Proc. Natl. Acad. Sci. USA 86: 5473-5477), pancreas-specific promoters (Edlund, et al., 1985. Science 230: 912-916), and mammary gland-specific promoters (e.g., milk whey promoter; U.S. Pat. No. 4,873,316 and European Application Publication No. 264,166). Developmentally-regulated promoters are also encompassed, e.g., the murine hox promoters (Kessel and Gruss, 1990. Science 249: 374-379) and the α-fetoprotein promoter (Campes and Tilghman, 1989. Genes Dev. 3: 537-546). With regards to these prokaryotic and eukaryotic vectors, mention is made of U.S. Pat. No. 6,750,059, the contents of which are incorporated by reference herein in their entirety. Other embodiments can utilize viral vectors, with regards to which mention is made of U.S. patent application Ser. No. 13/092,085, the contents of which are incorporated by reference herein in their entirety. Tissue-specific regulatory elements are known in the art and in this regard, mention is made of U.S. Pat. No. 7,776,321, the contents of which are incorporated by reference herein in their entirety. In some embodiments, a regulatory element can be operably linked to one or more elements of an engineered targeting moiety, polypeptide, viral (e.g., AAV) capsid system so as to drive expression of the one or more elements of the engineered targeting moiety, polypeptide, viral (e.g., AAV) capsid system described herein.

[0343] Vectors may be introduced and propagated in a prokaryote or prokaryotic cell. In some embodiments, a prokaryote is used to amplify copies of a vector to be introduced into a eukaryotic cell or as an intermediate vector in the production of a vector to be introduced into a eukaryotic cell (e.g., amplifying a plasmid as part of a viral vector packaging system). In some embodiments, a prokaryote is used to amplify copies of a vector and express one or more nucleic acids, such as to provide a source of one or more proteins for delivery to a host cell or host organism.

[0344] In some embodiments, the vector can be a fusion vector or fusion expression vector. In some embodiments, fusion vectors add a number of amino acids to a protein encoded therein, such as to the amino terminus, carboxy terminus, or both of a recombinant protein. Such fusion vectors can serve one or more purposes, such as: (i) to increase expression of recombinant protein; (ii) to increase the solubility of the recombinant protein; and (iii) to aid in the purification of the recombinant protein by acting as a ligand in affinity purification. In some embodiments, expression of polynucleotides (such as non-coding polynucleotides) and proteins in prokaryotes can be carried out in Escherichia coli with vectors containing constitutive or inducible promoters directing the expression of either fusion or non-fusion polynucleotides and/or proteins. In some embodiments, the fusion expression vector can include a proteolytic cleavage site, which can be introduced at the junction of the fusion vector backbone or other fusion moiety and the recombinant polynucleotide or protein to enable separation of the recombinant polynucleotide or protein from the fusion vector backbone or other fusion moiety subsequent to purification of the fusion polynucleotide or protein. Such enzymes, and their cognate recognition sequences, include Factor Xa, thrombin and enterokinase. Example fusion expression vectors include pGEX (Pharmacia Biotech Inc; Smith and Johnson, 1988. Gene 67: 31-40), pMAL (New England Biolabs, Beverly, Mass.) and pRIT5 (Pharmacia, Piscataway, N.J.) that fuse glutathione S-transferase (GST), maltose E binding protein, or protein A, respectively, to the target recombinant protein. Examples of suitable inducible non-fusion E. coli expression vectors include pTrc (Amrann et al., (1988) Gene 69:301-315) and pET IId (Studier et al., GENE EXPRESSION TECHNOLOGY: METHODS IN ENZYMOLOGY 185, Academic Press, San Diego, Calif (1990) 60-89).

[0345] In some embodiments, one or more vectors driving expression of one or more elements of an engineered targeting moiety, polypeptide, viral (e.g., AAV) capsid system described herein are introduced into a host cell such that expression of the elements of the engineered delivery system described herein direct formation of an engineered targeting moiety, polypeptide, viral (e.g., AAV) capsid system described herein (including but not limited to an engineered gene transfer agent particle, which is described in greater detail elsewhere herein). For example, different elements of the engineered targeting moiety, polypeptide, viral (e.g., AAV) capsid system described herein can each be operably linked to separate regulatory elements on separate vectors. RNA(s) of different elements of the engineered delivery system described herein can be delivered to an animal or mammal or cell thereof to produce an animal or mammal or cell thereof that constitutively or inducibly or conditionally expresses different elements of the engineered targeting moiety, polypeptide, viral (e.g., AAV) capsid system described herein that incorporates one or more elements of the engineered targeting moiety, polypeptide, viral (e.g., AAV) capsid system described herein or contains one or more cells that incorporates and/or expresses one or more elements of the engineered targeting moiety, polypeptide, viral (e.g., AAV) capsid system described herein.

[0346] In some embodiments, two or more of the elements expressed from the same or different regulatory element(s), can be combined in a single vector, with one or more additional vectors providing any components of the system not included in the first vector. Engineered targeting moiety, polypeptide, viral (e.g., AAV) capsid system polynucleotides that are combined in a single vector may be arranged in any suitable orientation, such as one element located 5′ with respect to (“upstream” of) or 3′ with respect to (“downstream” of) a second element. The coding sequence of one element may be located on the same or opposite strand of the coding sequence of a second element, and oriented in the same or opposite direction. In some embodiments, a single promoter drives expression of a transcript encoding one or more engineered targeting moiety, polypeptide, viral (e.g., AAV) capsid proteins, embedded within one or more intron sequences (e.g., each in a different intron, two or more in at least one intron, or all in a single intron). In some embodiments, the engineered targeting moiety, polypeptide, viral (e.g., AAV) capsid polynucleotides can be operably linked to and expressed from the same promoter.

### Vector Features

[0347] The vectors can include additional features that can confer one or more functionalities to the vector, the polynucleotide to be delivered, a virus particle produced there from, or polypeptide expressed thereof. Such features include, but are not limited to, regulatory elements, selectable markers, molecular identifiers (e.g., molecular barcodes), stabilizing elements, and the like. It will be appreciated by those skilled in the art that the design of the expression vector and additional features included can depend on such factors as the choice of the host cell to be transformed, the level of expression desired, etc.

### Regulatory Elements

[0348] In embodiments, the polynucleotides and/or vectors thereof described herein (such as the engineered targeting moiety, polypeptide, viral (e.g., AAV) capsid polynucleotides of the present invention) can include one or more regulatory elements that can be operatively linked to the polynucleotide. The term “regulatory element” is intended to include promoters, enhancers, internal ribosomal entry sites (IRES), and other expression control elements (e.g., transcription termination signals, such as polyadenylation signals and poly-U sequences). Such regulatory elements are described, for example, in Goeddel, GENE EXPRESSION TECHNOLOGY: METHODS IN ENZYMOLOGY 185, Academic Press, San Diego, Calif. (1990). Regulatory elements include those that direct constitutive expression of a nucleotide sequence in many types of host cell and those that direct expression of the nucleotide sequence only in certain host cells (e.g., tissue-specific regulatory sequences). A tissue-specific promoter can direct expression primarily in a desired tissue of interest, such as muscle, neuron, bone, skin, blood, specific organs (e.g., liver, pancreas), or particular cell types (e.g., lymphocytes). Regulatory elements may also direct expression in a temporal-dependent manner, such as in a cell-cycle dependent or developmental stage-dependent manner, which may or may not also be tissue or cell-type specific. In some embodiments, a vector comprises one or more pol III promoter (e.g., 1, 2, 3, 4, 5, or more pol III promoters), one or more pol II promoters (e.g., 1, 2, 3, 4, 5, or more pol II promoters), one or more pol I promoters (e.g., 1, 2, 3, 4, 5, or more pol I promoters), or combinations thereof. Examples of pol III promoters include, but are not limited to, U6 and H1 promoters. Examples of pol II promoters include, but are not limited to, the retroviral Rous sarcoma virus (RSV) LTR promoter (optionally with the RSV enhancer), the cytomegalovirus (CMV) promoter (optionally with the CMV enhancer) (see, e.g., Boshart et al, Cell, 41:521-530 (1985)), the SV40 promoter, the dihydrofolate reductase promoter, the β-actin promoter, the phosphoglycerol kinase (PGK) promoter, and the EF1α promoter. Also encompassed by the term “regulatory element” are enhancer elements, such as WPRE; CMV enhancers; the R-U5′ segment in LTR of HTLV-I (Mol. Cell. Biol., Vol. 8(1), p. 466-472, 1988); SV40 enhancer; and the intron sequence between exons 2 and 3 of rabbit β-globin (Proc. Natl. Acad. Sci. USA., Vol. 78(3), p. 1527-31, 1981).

[0349] In some embodiments, the regulatory sequence can be a regulatory sequence described in U.S. Pat. No. 7,776,321, U.S. Pat. Pub. No. 2011/0027239, and PCT publication WO 2011/028929, the contents of which are incorporated by reference herein in their entirety. In some embodiments, the vector can contain a minimal promoter. In some embodiments, the minimal promoter is the Mecp2 promoter, tRNA promoter, or U6. In a further embodiment, the minimal promoter is tissue specific. In some embodiments, the length of the vector polynucleotide the minimal promoters and polynucleotide sequences is less than 4.4 Kb.

[0350] To express a polynucleotide, the vector can include one or more transcriptional and/or translational initiation regulatory sequences, e.g., promoters, that direct the transcription of the gene and/or translation of the encoded protein in a cell. In some embodiments a constitutive promoter may be employed. Suitable constitutive promoters for mammalian cells are generally known in the art and include, but are not limited to SV40, CAG, CMV, EF-1α, β-actin, RSV, and PGK. Suitable constitutive promoters for bacterial cells, yeast cells, and fungal cells are generally known in the art, such as a T-7 promoter for bacterial expression and an alcohol dehydrogenase promoter for expression in yeast.

[0351] In some embodiments, the regulatory element can be a regulated promoter. “Regulated promoter” refers to promoters that direct gene expression not constitutively, but in a temporally- and/or spatially-regulated manner, and includes tissue-specific, tissue-preferred and inducible promoters. In some embodiments, the regulated promoter is a tissue specific promoter as previously discussed elsewhere herein. Regulated promoters include conditional promoters and inducible promoters. In some embodiments, conditional promoters can be employed to direct expression of a polynucleotide in a specific cell type, under certain environmental conditions, and/or during a specific state of development. Suitable tissue specific promoters can include, but are not limited to, CNS and/or muscle tissue and cell specific promoters.

[0352] Suitable muscle tissue/cell specific promoters include, but are not limited to CK8, MHCK7, Myoglobin promoter (Mb), Desmin promoter, muscle creatine kinase promoter (MCK) and variants thereof, and SPc5-12 synthetic promoter.

[0353] Suitable neuronal tissue/cell specific promoters include, but are not limited to, GFAP promoter (astrocytes), SYN1 promoter (neurons), and NSE/RU5′ (mature neurons).

[0354] Other suitable CNS specific promoters can include, but are not limited to, neuroactive peptide cholecystokinin (CCK) (see e.g., Chhatawl et al. Gene Therapy volume 14, pages 575-583(2007)), a brain specific DNA MiniPromoter (such as any of those identified for brain or pan-neronal expression as in de Leeuw et al. Mol. Therapy. 1(5): 2014. doi:10.1038/mtm.2013.5), myelin basic promoter (MBP) (see e.g., von Jonquieres, G., Mersmann, N., Klugmann, C. B., Harasta, A. E., Lutz, B., Teahan, O., et al. (2013). Glial promoter selectivity following AAV-delivery to the immature brain. PLoS One 8 (6), e65646. doi: 10.1371/journal.pone.0065646), glial fibrillary acid protein (GFAP) for expression in astrocytes (see e.g., Smith-Arica, J. R., Morelli, A. E., Larregina, A. T., Smith, J., Lowenstein, P. R., Castro, M. G. (2000). Cell-type-specific and regulatable transgenesis in the adult brain: adenovirus-encoded combined transcriptional targeting and inducible transgene expression. Mol. Ther. 2 (6), 579-587. doi: 10.1006/mthe.2000.0215 and Lee, Y., Messing, A., Su, M., Brenner, M. (2008). GFAP promoter elements required for region-specific and astrocyte-specific expression. Glia 56 (5), 481-493. doi: 10.1002/glia.20622), human myelin associated glycoprotein promoter (full-length or truncated) (see e.g., von Jonquieres, G., Frohlich, D., Klugmann, C. B., Wen, X., Harasta, A. E., Ramkumar, R., et al. (2016). Recombinant human myelin-associated glycoprotein promoter drives selective AAV-mediated transgene expression in oligodendrocytes. Front. Mol. Neurosci. 9, 13. doi: 10.3389/fnmol.2016.00013), F4/80 promoter (see e.g., Rosario, A. M., Cruz, P. E., Ceballos-Diaz, C., Strickland, M. R., Siemienski, Z., Pardo, M., et al. (2016). Microglia-specific targeting by novel capsid-modified AAV6 vectors. Mol. Ther. Methods Clin. Dev. 3, 16026. doi: 10.1038/mtm.2016.26), phosphate-activated glutaminase (PAG) or the vesicular glutamate transporter (vGLUT) promoter (for about 90% glutamatergic neuron-specific expression) (see e.g., Rasmussen, M., Kong, L., Zhang, G. R., Liu, M., Wang, X., Szabo, G., et al. (2007). Glutamatergic or GABAergic neuron-specific, long-term expression in neocortical neurons from helper virus-free HSV-1 vectors containing the phosphate-activated glutaminase, vesicular glutamate transporter-1, or glutamic acid decarboxylase promoter. Brain Res. 1144, 19-32. doi: 10.1016/j.brainres.2007.01.125), glutamic acid decarboxylase (GAD) promoter (for about 90% GABAergic neuron-specific expression) (see e.g., Rasmussen, M., Kong, L., Zhang, G. R., Liu, M., Wang, X., Szabo, G., et al. (2007). Glutamatergic or GABAergic neuron-specific, long-term expression in neocortical neurons from helper virus-free HSV-1 vectors containing the phosphate-activated glutaminase, vesicular glutamate transporter-1, or glutamic acid decarboxylase promoter. Brain Res. 1144, 19-32. doi: 10.1016/j.brainres.2007.01.125), MeCP2 promoter (see e.g., Gray et al. Hum Gene Ther. 2011 September; 22(9):1143-53. doi: 10.1089/hum.2010.245), and retinoblastoma gene promoter (see e.g., Jiang et al., J. Biol. Chem. 2001. 276, 593-600).

[0355] Other tissue and/or cell specific promoters are discussed elsewhere herein and can be generally known in the art and are within the scope of this disclosure.

[0356] Inducible/conditional promoters can be positively inducible/conditional promoters (e.g., a promoter that activates transcription of the polynucleotide upon appropriate interaction with an activated activator, or an inducer (compound, environmental condition, or other stimulus) or a negative/conditional inducible promoter (e.g., a promoter that is repressed (e.g., bound by a repressor) until the repressor condition of the promotor is removed (e.g. inducer binds a repressor bound to the promoter stimulating release of the promoter by the repressor or removal of a chemical repressor from the promoter environment). The inducer can be a compound, environmental condition, or other stimulus. Thus, inducible/conditional promoters can be responsive to any suitable stimuli such as chemical, biological, or other molecular agents, temperature, light, and/or pH. Suitable inducible/conditional promoters include, but are not limited to, Tet-On, Tet-Off, Lac promoter, pBad, AlcA, LexA, Hsp70 promoter, Hsp90 promoter, pDawn, XVE/OlexA, GVG, and pOp/LhGR.

[0357] Where expression in a plant cell is desired, the components of the engineered targeting moiety, polypeptide, viral (e.g., AAV) capsid system described herein are typically placed under control of a plant promoter, i.e., a promoter operable in plant cells. The use of different types of promoters is envisaged. In some embodiments, inclusion of an engineered targeting moiety, polypeptide, viral (e.g., AAV) capsid system vector in a plant can be for AAV vector production purposes.

[0358] A constitutive plant promoter is a promoter that is able to express the open reading frame (ORF) that it controls in all or nearly all of the plant tissues during all or nearly all developmental stages of the plant (referred to as “constitutive expression”). One non-limiting example of a constitutive promoter is the cauliflower mosaic virus 35S promoter. Different promoters may direct the expression of a gene in different tissues or cell types, or at different stages of development, or in response to different environmental conditions. In particular embodiments, one or more of the engineered targeting moiety, polypeptide, viral (e.g., AAV) capsid system components are expressed under the control of a constitutive promoter, such as the cauliflower mosaic virus 35S promoter issue-preferred promoters can be utilized to target enhanced expression in certain cell types within a particular plant tissue, for instance vascular cells in leaves or roots or in specific cells of the seed. Examples of particular promoters for use in the engineered targeting moiety, polypeptide, viral (e.g., AAV) capsid system are found in Kawamata et al., (1997) Plant Cell Physiol 38:792-803; Yamamoto et al., (1997) Plant J 12:255-65; Hire et al., (1992) Plant Mol Biol 20:207-18; Kuster et al., (1995) Plant Mol Biol 29:759-72; and Capana et al., (1994) Plant Mol Biol 25:681-91.

[0359] Examples of promoters that are inducible and that can allow for spatiotemporal control of gene editing or gene expression may use a form of energy. The form of energy may include but is not limited to sound energy, electromagnetic radiation, chemical energy and/or thermal energy. Examples of inducible systems include tetracycline inducible promoters (Tet-On or Tet-Off), small molecule two-hybrid transcription activations systems (FKBP, ABA, etc.), or light inducible systems (Phytochrome, LOV domains, or cryptochrome)., such as a Light Inducible Transcriptional Effector (LITE) that direct changes in transcriptional activity in a sequence-specific manner. The components of a light inducible system may include one or more elements of the engineered targeting moiety, polypeptide, viral (e.g., AAV) capsid system described herein, a light-responsive cytochrome heterodimer (e.g., from Arabidopsis thaliana), and a transcriptional activation/repression domain. In some embodiments, the vector can include one or more of the inducible DNA binding proteins provided in PCT publication WO 2014/018423 and US Publications, 2015/0291966, 2017/0166903, 2019/0203212, which describe e.g., embodiments of inducible DNA binding proteins and methods of use and can be adapted for use with the present invention.

[0360] In some embodiments, transient or inducible expression can be achieved by including, for example, chemical-regulated promotors, i.e., whereby the application of an exogenous chemical induces gene expression. Modulation of gene expression can also be obtained by including a chemical-repressible promoter, where application of the chemical represses gene expression. Chemical-inducible promoters include, but are not limited to, the maize ln2-2 promoter, activated by benzene sulfonamide herbicide safeners (De Veylder et al., (1997) Plant Cell Physiol 38:568-77), the maize GST promoter (GST-ll-27, WO93/01294), activated by hydrophobic electrophilic compounds used as pre-emergent herbicides, and the tobacco PR-1 a promoter (Ono et al., (2004) Biosci Biotechnol Biochem 68:803-7) activated by salicylic acid. Promoters that are regulated by antibiotics, such as tetracycline-inducible and tetracycline-repressible promoters (Gatz et al., (1991) Mol Gen Genet 227:229-37; U.S. Pat. Nos. 5,814,618 and 5,789,156) can also be used herein.

[0361] In some embodiments, the vector or system thereof can include one or more elements capable of translocating and/or expressing an engineered targeting moiety, polypeptide, viral (e.g., AAV) capsid polynucleotide to/in a specific cell component or organelle. Such organelles can include, but are not limited to, nucleus, ribosome, endoplasmic reticulum, Golgi apparatus, chloroplast, mitochondria, vacuole, lysosome, cytoskeleton, plasma membrane, cell wall, peroxisome, centrioles, etc.

### Selectable Markers and Tags

[0362] One or more of the engineered targeting moieties, polypeptide, viral (e.g., AAV) capsid polynucleotides can be operably linked, fused to, or otherwise modified to include a polynucleotide that encodes or is a selectable marker or tag, which can be a polynucleotide or polypeptide. In some embodiments, the polypeptide encoding a polypeptide selectable marker can be incorporated in the engineered targeting moiety, polypeptide, viral (e.g., AAV) capsid system polynucleotide such that the selectable marker polypeptide, when translated, is inserted between two amino acids between the N- and C-terminus of the engineered targeting moiety, polypeptide, viral (e.g., AAV) capsid polypeptide or at the N- and/or C-terminus of the engineered targeting moiety, polypeptide, viral (e.g., AAV) capsid polypeptide. In some embodiments, the selectable marker or tag is a polynucleotide barcode or unique molecular identifier (UMI).

[0363] It will be appreciated that the polynucleotide encoding such selectable markers or tags can be incorporated into a polynucleotide encoding one or more components of the engineered targeting moiety, polypeptide, viral (e.g., AAV) capsid system described herein in an appropriate manner to allow expression of the selectable marker or tag. Such techniques and methods are described elsewhere herein and will be instantly appreciated by one of ordinary skill in the art in view of this disclosure. Many such selectable markers and tags are generally known in the art and are intended to be within the scope of this disclosure.

[0364] Suitable selectable markers and tags include, but are not limited to, affinity tags, such as chitin binding protein (CBP), maltose binding protein (MBP), glutathione-S-transferase (GST), poly(His) tag; solubilization tags such as thioredoxin (TRX) and poly(NANP), MBP, and GST; chromatography tags such as those consisting of polyanionic amino acids, such as FLAG-tag; epitope tags such as V5-tag, Myc-tag, HA-tag and NE-tag; protein tags that can allow specific enzymatic modification (such as biotinylation by biotin ligase) or chemical modification (such as reaction with FlAsH-EDT2 for fluorescence imaging), DNA and/or RNA segments that contain restriction enzyme or other enzyme cleavage sites; DNA segments that encode products that provide resistance against otherwise toxic compounds including antibiotics, such as, spectinomycin, ampicillin, kanamycin, tetracycline, Basta, neomycin phosphotransferase II (NEO), hygromycin phosphotransferase (HPT)) and the like; DNA and/or RNA segments that encode products that are otherwise lacking in the recipient cell (e.g., tRNA genes, auxotrophic markers); DNA and/or RNA segments that encode products which can be readily identified (e.g., phenotypic markers such as β-galactosidase, GUS; fluorescent proteins such as green fluorescent protein (GFP), cyan (CFP), yellow (YFP), red (RFP), luciferase, and cell surface proteins); polynucleotides that can generate one or more new primer sites for PCR (e.g., the juxtaposition of two DNA sequences not previously juxtaposed), DNA sequences not acted upon or acted upon by a restriction endonuclease or other DNA modifying enzyme, chemical, etc.; epitope tags (e.g., GFP, FLAG- and His-tags), and, DNA sequences that make a molecular barcode or unique molecular identifier (UMI), DNA sequences required for a specific modification (e.g., methylation) that allows its identification. Other suitable markers will be appreciated by those of skill in the art.

[0365] Selectable markers and tags can be operably linked to one or more components of the engineered AAV capsid system described herein via suitable linker, such as a glycine or glycine serine linkers as short as GS or GG up to (GGGGG)₃ (SEQ ID NO: 1709) or (GGGGS)₃ (SEQ ID NO: 1710). Other suitable linkers are described elsewhere herein.

[0366] The vector or vector system can include one or more polynucleotides encoding one or more targeting moieties. In some embodiments, the targeting moiety encoding polynucleotides can be included in the vector or vector system, such as a viral vector system, such that they are expressed within and/or on the virus particle(s) produced such that the virus particles can be targeted to specific cells, tissues, organs, etc. In some embodiments, the targeting moiety encoding polynucleotides can be included in the vector or vector system such that the engineered targeting moiety, polypeptide, viral (e.g., AAV) capsid polynucleotide(s) and/or products expressed therefrom include the targeting moiety and can be targeted to specific cells, tissues, organs, etc. In some embodiments, such as non-viral carriers, the targeting moiety can be attached to the carrier (e.g., polymer, lipid, inorganic molecule etc.) and can be capable of targeting the carrier and any attached or associated engineered targeting moiety, polypeptide, viral (e.g., AAV) capsid polynucleotide(s) to specific cells, tissues, organs, etc.

### Cell-Free Vector and Polynucleotide Expression

[0367] In some embodiments, the polynucleotide encoding one or more features of the engineered targeting moiety, polypeptide, viral (e.g., AAV) capsid system can be expressed from a vector or suitable polynucleotide in a cell-free in vitro system. In other words, the polynucleotide can be transcribed and optionally translated in vitro. In vitro transcription/translation systems and appropriate vectors are generally known in the art and commercially available. Generally, in vitro transcription and in vitro translation systems replicate the processes of RNA and protein synthesis, respectively, outside of the cellular environment. Vectors and suitable polynucleotides for in vitro transcription can include T7, SP6, T3, promoter regulatory sequences that can be recognized and acted upon by an appropriate polymerase to transcribe the polynucleotide or vector.

[0368] In vitro translation can be stand-alone (e.g., translation of a purified polyribonucleotide) or linked/coupled to transcription. In some embodiments, the cell-free (or in vitro) translation system can include extracts from rabbit reticulocytes, wheat germ, and/or E. coli. The extracts can include various macromolecular components that are needed for translation of exogenous RNA (e.g., 70S or 80S ribosomes, tRNAs, aminoacyl-tRNA, synthetases, initiation, elongation factors, termination factors, etc.). Other components can be included or added during the translation reaction, including but not limited to, amino acids, energy sources (ATP, GTP), energy regenerating systems (creatine phosphate and creatine phosphokinase (eukaryotic systems)) (phosphoenol pyruvate and pyruvate kinase for bacterial systems), and other co-factors (Mg2+, K+, etc.). As previously mentioned, in vitro translation can be based on RNA or DNA starting material. Some translation systems can utilize an RNA template as starting material (e.g., reticulocyte lysates and wheat germ extracts). Some translation systems can utilize a DNA template as a starting material (e.g., E. coli-based systems). In these systems transcription and translation are coupled and DNA is first transcribed into RNA, which is subsequently translated. Suitable standard and coupled cell-free translation systems are generally known in the art and are commercially available.

### Codon Optimization of Vector Polynucleotides

[0369] As described elsewhere herein, the polynucleotide encoding one or more embodiments of the engineered targeting moiety, polypeptide, viral (e.g., AAV) capsid system described herein can be codon optimized. In some embodiments, one or more polynucleotides contained in a vector (“vector polynucleotides”) described herein that are in addition to an optionally codon optimized polynucleotide encoding embodiments of the engineered targeting moiety, polypeptide, viral (e.g., AAV) capsid system described herein can be codon optimized. In general, codon optimization refers to a process of modifying a nucleic acid sequence for enhanced expression in the host cells of interest by replacing at least one codon (e.g., about or more than about 1, 2, 3, 4, 5, 10, 15, 20, 25, 50, or more codons) of the native sequence with codons that are more frequently or most frequently used in the genes of that host cell while maintaining the native amino acid sequence. Various species exhibit particular bias for certain codons of a particular amino acid. Codon bias (differences in codon usage between organisms) often correlates with the efficiency of translation of messenger RNA (mRNA), which is in turn believed to be dependent on, among other things, the properties of the codons being translated and the availability of particular transfer RNA (tRNA) molecules. The predominance of selected tRNAs in a cell is generally a reflection of the codons used most frequently in peptide synthesis. Accordingly, genes can be tailored for optimal gene expression in a given organism based on codon optimization. Codon usage tables are readily available, for example, at the “Codon Usage Database” available at www.kazusa.oijp/codon/ and these tables can be adapted in a number of ways. See Nakamura, Y., et al. “Codon usage tabulated from the international DNA sequence databases: status for the year 2000” Nucl. Acids Res. 28:292 (2000). Computer algorithms for codon optimizing a particular sequence for expression in a particular host cell are also available, such as Gene Forge (Aptagen; Jacobus, PA), are also available. In some embodiments, one or more codons (e.g., 1, 2, 3, 4, 5, 10, 15, 20, 25, 50, or more, or all codons) in a sequence encoding a DNA/RNA-targeting Cas protein corresponds to the most frequently used codon for a particular amino acid. As to codon usage in yeast, reference is made to the online Yeast Genome database available at http://www.yeastgenome.org/community/codon_usage.shtml, or Codon selection in yeast, Bennetzen and Hall, J Biol Chem. 1982 Mar. 25; 257(6):3026-31. As to codon usage in plants including algae, reference is made to Codon usage in higher plants, green algae, and cyanobacteria, Campbell and Gowri, Plant Physiol. 1990 January; 92(1):1-11.; as well as Codon usage in plant genes, Murray et al, Nucleic Acids Res. 1989 Jan. 25; 17(2):477-98; or Selection on the codon bias of chloroplast and cyanelle genes in different plant and algal lineages, Morton B R, J Mol Evol. 1998 April; 46(4):449-59.

[0370] The vector polynucleotide can be codon optimized for expression in a specific cell-type, tissue type, organ type, and/or subject type. In some embodiments, a codon optimized sequence is a sequence optimized for expression in a eukaryote, e.g., humans (i.e., being optimized for expression in a human or human cell), or for another eukaryote, such as another animal (e.g., a mammal or avian) as is described elsewhere herein. Such codon optimized sequences are within the ambit of the ordinary skilled artisan in view of the description herein. In some embodiments, the polynucleotide is codon optimized for a specific cell type. Such cell types can include, but are not limited to, muscle cells (e.g., skeletal and/or muscle cells), CNS epithelial cells (including but not limited to the cells lining the brain ventricles), nerve cells (nerves, brain cells, spinal column cells, nerve support cells (e.g., astrocytes, glial cells, Schwann cells etc.), connective tissue cells of the CNS (fat and other soft tissue padding cells of the CNS such as the meninges), stem cells and other progenitor cells, CNS immune cells, germ cells, and combinations thereof. Such codon optimized sequences are within the ambit of the ordinary skilled artisan in view of the description herein. In some embodiments, the polynucleotide is codon optimized for a specific tissue type. Such tissue types can include, but are not limited to, CNS tissue and/or muscle tissue and/or cells thereof. In some embodiments, the tissue types include muscle tissue and/or cells thereof. In some embodiments, the tissue types include cardiac muscle tissue and/or cells thereof. In some embodiments, the tissue types include skeletal muscle tissue and/or cells thereof. Such codon optimized sequences are within the ambit of the ordinary skilled artisan in view of the description herein. In some embodiments, the polynucleotide is codon optimized for a specific organ. Such organs include, but are not limited to, the brain. Such codon optimized sequences are within the ambit of the ordinary skilled artisan in view of the description herein.

[0371] In some embodiments, a vector polynucleotide is codon optimized for expression in particular cells, such as prokaryotic or eukaryotic cells. The eukaryotic cells may be those of or derived from a particular organism, such as a plant or a mammal, including but not limited to human, or non-human eukaryote or animal or mammal as discussed herein, e.g., mouse, rat, rabbit, dog, livestock, or non-human mammal or primate.

### Non-Viral Vectors and Carriers

[0372] In some embodiments, the vector is a non-viral vector or carrier. In some embodiments, non-viral vectors can have the advantage(s) of reduced toxicity and/or immunogenicity and/or increased bio-safety as compared to viral vectors The terms of art “Non-viral vectors and carriers” and as used herein in this context refers to molecules and/or compositions that are not based on one or more component of a virus or virus genome (excluding any nucleotide to be delivered and/or expressed by the non-viral vector) that can be capable of attaching to, incorporating, coupling, and/or otherwise interacting with an engineered targeting moiety, polypeptide, viral (e.g., AAV) capsid polynucleotide of the present invention and can be capable of ferrying the polynucleotide to a cell and/or expressing the polynucleotide. It will be appreciated that this does not exclude the inclusion of a virus-based polynucleotide that is to be delivered. For example, if a gRNA to be delivered is directed against a virus component and it is inserted or otherwise coupled to an otherwise non-viral vector or carrier, this would not make said vector a “viral vector”. Non-viral vectors and carriers include naked polynucleotides, chemical-based carriers, polynucleotide (non-viral) based vectors, and particle-based carriers. It will be appreciated that the term “vector” as used in the context of non-viral vectors and carriers refers to polynucleotide vectors and “carriers” used in this context refers to a non-nucleic acid or polynucleotide molecule or composition that be attached to or otherwise interact with a polynucleotide to be delivered, such as an engineered targeting moiety, polypeptide, viral (e.g., AAV) capsid polynucleotide of the present invention.

### Naked Polynucleotides

[0373] In some embodiments one or more engineered targeting moiety, polypeptide, viral (e.g., AAV) capsid polynucleotides described elsewhere herein can be included in a naked polynucleotide. The term of art “naked polynucleotide” as used herein refers to polynucleotides that are not associated with another molecule (e.g., proteins, lipids, and/or other molecules) that can often help protect it from environmental factors and/or degradation. As used herein, associated with includes, but is not limited to, linked to, adhered to, adsorbed to, enclosed in, enclosed in or within, mixed with, and the like. Naked polynucleotides that include one or more of the engineered targeting moiety, polypeptide, viral (e.g., AAV) capsid polynucleotides described herein can be delivered directly to a host cell and optionally expressed therein. The naked polynucleotides can have any suitable two- and three-dimensional configurations. By way of non-limiting examples, naked polynucleotides can be single-stranded molecules, double stranded molecules, circular molecules (e.g., plasmids and artificial chromosomes), molecules that contain portions that are single stranded and portions that are double stranded (e.g., ribozymes), and the like. In some embodiments, the naked polynucleotide contains only the engineered targeting moiety, polypeptide, viral (e.g., AAV) capsid polynucleotide(s) of the present invention. In some embodiments, the naked polynucleotide can contain other nucleic acids and/or polynucleotides in addition to the engineered targeting moiety, polypeptide, viral (e.g., AAV) capsid polynucleotide(s) of the present invention. The naked polynucleotides can include one or more elements of a transposon system. Transposons and system thereof are described in greater detail elsewhere herein.

### Non-Viral Polynucleotide Vectors

[0374] In some embodiments, one or more of the engineered targeting moiety, polypeptide, viral (e.g., AAV) capsid polynucleotides can be included in a non-viral polynucleotide vector. Suitable non-viral polynucleotide vectors include, but are not limited to, transposon vectors and vector systems, plasmids, bacterial artificial chromosomes, yeast artificial chromosomes, AR(antibiotic resistance)-free plasmids and miniplasmids, circular covalently closed vectors (e.g., minicircles, minivectors, miniknots,), linear covalently closed vectors (“dumbbell shaped”), MIDGE (minimalistic immunologically defined gene expression) vectors, MiLV (micro-linear vector) vectors, Ministrings, mini-intronic plasmids, PSK systems (post-segregationally killing systems), ORT (operator repressor titration) plasmids, and the like. See e.g., Hardee et al. 2017. Genes. 8(2):65.

[0375] In some embodiments, the non-viral polynucleotide vector can have a conditional origin of replication. In some embodiments, the non-viral polynucleotide vector can be an ORT plasmid. In some embodiments, the non-viral polynucleotide vector can have a minimalistic immunologically defined gene expression. In some embodiments, the non-viral polynucleotide vector can have one or more post-segregationally killing system genes. In some embodiments, the non-viral polynucleotide vector is AR-free. In some embodiments, the non-viral polynucleotide vector is a minivector. In some embodiments, the non-viral polynucleotide vector includes a nuclear localization signal. In some embodiments, the non-viral polynucleotide vector can include one or more CpG motifs. In some embodiments, the non-viral polynucleotide vectors can include one or more scaffold/matrix attachment regions (S/MARs). See e.g., Mirkovitch et al. 1984. Cell. 39:223-232, Wong et al. 2015. Adv. Genet. 89:113-152, whose techniques and vectors can be adapted for use in the present invention. S/MARs are AT-rich sequences that play a role in the spatial organization of chromosomes through DNA loop base attachment to the nuclear matrix. S/MARs are often found close to regulatory elements such as promoters, enhancers, and origins of DNA replication. Inclusion of one or S/MARs can facilitate a once-per-cell-cycle replication to maintain the non-viral polynucleotide vector as an episome in daughter cells. In embodiments, the S/MAR sequence is located downstream of an actively transcribed polynucleotide (e.g., one or more engineered AAV capsid polynucleotides of the present invention) included in the non-viral polynucleotide vector. In some embodiments, the S/MAR can be a S/MAR from the beta-interferon gene cluster. See e.g., Verghese et al. 2014. Nucleic Acid Res. 42:e53; Xu et al. 2016. Sci. China Life Sci. 59:1024-1033; Jin et al. 2016. 8:702-711; Koirala et al. 2014. Adv. Exp. Med. Biol. 801:703-709; and Nehlsen et al. 2006. Gene Ther. Mol. Biol. 10:233-244, whose techniques and vectors can be adapted for use in the present invention.

[0376] In some embodiments, the non-viral vector is a transposon vector or system thereof. As used herein, “transposon” (also referred to as transposable element) refers to a polynucleotide sequence that is capable of moving form location in a genome to another. There are several classes of transposons. Transposons include retrotransposons and DNA transposons. Retrotransposons require the transcription of the polynucleotide that is moved (or transposed) in order to transpose the polynucleotide to a new genome or polynucleotide. DNA transposons are those that do not require reverse transcription of the polynucleotide that is moved (or transposed) in order to transpose the polynucleotide to a new genome or polynucleotide. In some embodiments, the non-viral polynucleotide vector can be a retrotransposon vector. In some embodiments, the retrotransposon vector includes long terminal repeats. In some embodiments, the retrotransposon vector does not include long terminal repeats. In some embodiments, the non-viral polynucleotide vector can be a DNA transposon vector. DNA transposon vectors can include a polynucleotide sequence encoding a transposase. In some embodiments, the transposon vector is configured as a non-autonomous transposon vector, meaning that the transposition does not occur spontaneously on its own. In some of these embodiments, the transposon vector lacks one or more polynucleotide sequences encoding proteins required for transposition. In some embodiments, the non-autonomous transposon vectors lack one or more Ac elements.

[0377] In some embodiments a non-viral polynucleotide transposon vector system can include a first polynucleotide vector that contains the engineered targeting moiety, polypeptide, viral (e.g., AAV) capsid polynucleotide(s) of the present invention flanked on the 5′ and 3′ ends by transposon terminal inverted repeats (TIRs) and a second polynucleotide vector that includes a polynucleotide capable of encoding a transposase coupled to a promoter to drive expression of the transposase. When both are expressed in the same cell the transposase can be expressed from the second vector and can transpose the material between the TIRs on the first vector (e.g., the engineered targeting moiety, polypeptide, viral (e.g., AAV) capsid polynucleotide(s) of the present invention) and integrate it into one or more positions in the host cell's genome. In some embodiments the transposon vector or system thereof can be configured as a gene trap. In some embodiments, the TIRs can be configured to flank a strong splice acceptor site followed by a reporter and/or other gene (e.g., one or more of the engineered targeting moieties, polypeptide, viral (e.g., AAV) capsid polynucleotide(s) of the present invention) and a strong poly A tail. When transposition occurs while using this vector or system thereof, the transposon can insert into an intron of a gene and the inserted reporter or other gene can provoke a mis-splicing process and as a result it in activates the trapped gene.

[0378] Any suitable transposon system can be used. Suitable transposon and systems thereof can include, but are not limited to, Sleeping Beauty transposon system (Tc1/mariner superfamily) (see e.g., Ivics et al. 1997. Cell. 91(4): 501-510), piggyBac (piggyBac superfamily) (see e.g., Li et al. 2013 110(25): E2279-E2287 and Yusa et al. 2011. PNAS. 108(4): 1531-1536), Tol2 (superfamily hAT), Frog Prince (Tcl/mariner superfamily) (see e.g., Miskey et al. 2003 Nucleic Acid Res. 31(23):6873-6881) and variants thereof.

### Chemical Carriers

[0379] In some embodiments the engineered targeting moiety, polypeptide, viral (e.g., AAV) capsid polynucleotide(s) can be coupled to a chemical carrier. Chemical carriers that can be suitable for delivery of polynucleotides can be broadly classified into the following classes: (i) inorganic particles, (ii) lipid-based, (iii) polymer-based, and (iv) peptide based. They can be categorized as (1) those that can form condensed complexes with a polynucleotide (such as the engineered targeting moiety, polypeptide, viral (e.g. AAV) capsid polynucleotide(s) of the present invention), (2) those capable of targeting specific cells, (3) those capable of increasing delivery of the polynucleotide (such as the engineered targeting moiety, polypeptide, viral (e.g. AAV) capsid polynucleotide(s) of the present invention) to the nucleus or cytosol of a host cell, (4) those capable of disintegrating from DNA/RNA in the cytosol of a host cell, and (5) those capable of sustained or controlled release. It will be appreciated that any one given chemical carrier can include features from multiple categories. The term “particle” as used herein, refers to any suitable sized particles for delivery of the engineered targeting moiety, polypeptide, viral (e.g., AAV) capsid system components described herein. Suitable sizes include macro-, micro-, and nano-sized particles.

[0380] In some embodiments, the non-viral carrier can be an inorganic particle. In some embodiments, the inorganic particle, can be a nanoparticle. The inorganic particles can be configured and optimized by varying size, shape, and/or porosity. In some embodiments, the inorganic particles are optimized to escape from the reticuloendothelial system. In some embodiments, the inorganic particles can be optimized to protect an entrapped molecule from degradation. The Suitable inorganic particles that can be used as non-viral carriers in this context can include, but are not limited to, calcium phosphate, silica, metals (e.g., gold, platinum, silver, palladium, rhodium, osmium, iridium, ruthenium, mercury, copper, rhenium, titanium, niobium, tantalum, and combinations thereof), magnetic compounds, particles, and materials, (e.g., supermagnetic iron oxide and magnetite), quantum dots, fullerenes (e.g., carbon nanoparticles, nanotubes, nanostrings, and the like), and combinations thereof. Other suitable inorganic non-viral carriers are discussed elsewhere herein.

[0381] In some embodiments, the non-viral carrier can be lipid-based. Suitable lipid-based carriers are also described in greater detail herein. In some embodiments, the lipid-based carrier includes a cationic lipid or an amphiphilic lipid that is capable of binding or otherwise interacting with a negative charge on the polynucleotide to be delivered (e.g., such as an engineered targeting moiety, polypeptide, viral (e.g., AAV) capsid polynucleotide of the present invention). In some embodiments, chemical non-viral carrier systems can include a polynucleotide such as the engineered targeting moiety, polypeptide, viral (e.g., AAV) capsid polynucleotide(s) of the present invention) and a lipid (such as a cationic lipid). These are also referred to in the art as lipoplexes. Other embodiments of lipoplexes are described elsewhere herein. In some embodiments, the non-viral lipid-based carrier can be a lipid nano emulsion. Lipid nano emulsions can be formed by the dispersion of an immisicible liquid in another stabilized emulsifying agent and can have particles of about 200 nm that are composed of the lipid, water, and surfactant that can contain the polynucleotide to be delivered (e.g., the engineered targeting moiety, polypeptide, viral (e.g., AAV) capsid polynucleotide(s) of the present invention). In some embodiments, the lipid-based non-viral carrier can be a solid lipid particle or nanoparticle.

[0382] In some embodiments, the non-viral carrier can be peptide-based. In some embodiments, the peptide-based non-viral carrier can include one or more cationic amino acids. In some embodiments, 35 to 40, 45, 50, 55, 60, 65, 70, 75, 80, 85, 90, 95, 99 or 100% of the amino acids are cationic. In some embodiments, peptide carriers can be used in conjunction with other types of carriers (e.g., polymer-based carriers and lipid-based carriers to functionalize these carriers). In some embodiments, the functionalization is targeting a host cell. Suitable polymers that can be included in the polymer-based non-viral carrier can include, but are not limited to, polyethylenimine (PEI), chitosan, poly (DL-lactide) (PLA), poly (DL-Lactide-co-glycoside) (PLGA), dendrimers (see e.g., US Pat. Pub. 2017/0079916 whose techniques and compositions can be adapted for use with the engineered targeting moiety, polypeptide, viral (e.g., AAV) capsid polynucleotides of the present invention), polymethacrylate, and combinations thereof.

[0383] In some embodiments, the non-viral carrier can be configured to release an engineered delivery system polynucleotide that is associated with or attached to the non-viral carrier in response to an external stimulus, such as pH, temperature, osmolarity, concentration of a specific molecule or composition (e.g., calcium, NaCl, and the like), pressure and the like. In some embodiments, the non-viral carrier can be a particle that is configured includes one or more of the engineered AAV capsid polynucleotides describe herein and an environmental triggering agent response element, and optionally a triggering agent. In some embodiments, the particle can include a polymer that can be selected from the group of polymethacrylates and polyacrylates. In some embodiments, the non-viral particle can include one or more embodiments of the compositions microparticles described in US Pat. Pubs. 20150232883 and 20050123596, whose techniques and compositions can be adapted for use in the present invention.

[0384] In some embodiments, the non-viral carrier can be a polymer-based carrier. In some embodiments, the polymer is cationic or is predominantly cationic such that it can interact in a charge-dependent manner with the negatively charged polynucleotide to be delivered (such as the engineered targeting moiety, polypeptide, viral (e.g., AAV) capsid polynucleotide(s) of the present invention). Polymer-based systems are described in greater detail elsewhere herein.

### Viral Vectors

[0385] In some embodiments, the vector is a viral vector. The term of art “viral vector” and as used herein in this context refers to polynucleotide based vectors that contain one or more elements from or based upon one or more elements of a virus that can be capable of expressing and packaging a polynucleotide, such as an engineered targeting moiety, polypeptide, viral (e.g., AAV) capsid polynucleotide of the present invention, into a virus particle and producing said virus particle when used alone or with one or more other viral vectors (such as in a viral vector system). Viral vectors and systems thereof can be used for producing viral particles for delivery of and/or expression of one or more components of the engineered targeting moiety, polypeptide, viral (e.g., AAV) capsid system described herein. The viral vector can be part of a viral vector system involving multiple vectors. In some embodiments, systems incorporating multiple viral vectors can increase the safety of these systems. Suitable viral vectors can include adenoviral-based vectors, adeno associated vectors, helper-dependent adenoviral (HdAd) vectors, hybrid adenoviral vectors, and the like. Other embodiments of viral vectors and viral particles produce therefrom are described elsewhere herein. In some embodiments, the viral vectors are configured to produce replication incompetent viral particles for improved safety of these systems.

### Adenoviral Vectors, Helper-Dependent Adenoviral Vectors, and Hybrid Adenoviral Vectors

[0386] In some embodiments, the vector can be an adenoviral vector. In some embodiments, the adenoviral vector can include elements such that the virus particle produced using the vector or system thereof can be serotype 2, 5, or 9. In some embodiments, the polynucleotide to be delivered via the adenoviral particle can be up to about 8 kb. Thus, in some embodiments, an adenoviral vector can include a DNA polynucleotide to be delivered that can range in size from about 0.001 kb to about 8 kb. Adenoviral vectors have been used successfully in several contexts (see e.g., Teramato et al. 2000. Lancet. 355:1911-1912; Lai et al. 2002. DNA Cell. Biol. 21:895-913; Flotte et al., 1996. Hum. Gene. Ther. 7:1145-1159; and Kay et al. 2000. Nat. Genet. 24:257-261. The engineered AAV capsids can be included in an adenoviral vector to produce adenoviral particles containing said engineered AAV capsids.

[0387] In some embodiments the vector can be a helper-dependent adenoviral vector or system thereof. These are also referred to in the field as “gutless” or “gutted” vectors and are a modified generation of adenoviral vectors (see e.g., Thrasher et al. 2006. Nature. 443:E5-7). In embodiments of the helper-dependent adenoviral vector system one vector (the helper) can contain all the viral genes required for replication but contains a conditional gene defect in the packaging domain. The second vector of the system can contain only the ends of the viral genome, one or more engineered AAV capsid polynucleotides, and the native packaging recognition signal, which can allow selective packaged release from the cells (see e.g., Cideciyan et al. 2009. N Engl J Med. 361:725-727). Helper-dependent Adenoviral vector systems have been successful for gene delivery in several contexts (see e.g., Simonelli et al. 2010. J Am Soc Gene Ther. 18:643-650; Cideciyan et al. 2009. N Engl J Med. 361:725-727; Crane et al. 2012. Gene Ther. 19(4):443-452; Alba et al. 2005. Gene Ther. 12:18-S27; Croyle et al. 2005. Gene Ther. 12:579-587; Amalfitano et al. 1998. J. Virol. 72:926-933; and Morral et al. 1999. PNAS. 96:12816-12821). The techniques and vectors described in these publications can be adapted for inclusion and delivery of the engineered AAV capsid polynucleotides described herein. In some embodiments, the polynucleotide to be delivered via the viral particle produced from a helper-dependent adenoviral vector or system thereof can be up to about 38 kb. Thus, in some embodiments, an adenoviral vector can include a DNA polynucleotide to be delivered that can range in size from about 0.001 kb to about 37 kb (see e.g., Rosewell et al. 2011. J. Genet. Syndr. Gene Ther. Suppl. 5:001).

[0388] In some embodiments, the vector is a hybrid-adenoviral vector or system thereof. Hybrid adenoviral vectors are composed of the high transduction efficiency of a gene-deleted adenoviral vector and the long-term genome-integrating potential of adeno-associated, retroviruses, lentivirus, and transposon based-gene transfer. In some embodiments, such hybrid vector systems can result in stable transduction and limited integration site. See e.g., Balague et al. 2000. Blood. 95:820-828; Morral et al. 1998. Hum. Gene Ther. 9:2709-2716; Kubo and Mitani. 2003. J. Virol. 77(5): 2964-2971; Zhang et al. 2013. PloS One. 8(10) e76771; and Cooney et al. 2015. Mol. Ther. 23(4):667-674), whose techniques and vectors described therein can be modified and adapted for use in the engineered AAV capsid system of the present invention. In some embodiments, a hybrid-adenoviral vector can include one or more features of a retrovirus and/or an adeno-associated virus. In some embodiments the hybrid-adenoviral vector can include one or more features of a spuma retrovirus or foamy virus (FV). See e.g., Ehrhardt et al. 2007. Mol. Ther. 15:146-156 and Liu et al. 2007. Mol. Ther. 15:1834-1841, whose techniques and vectors described therein can be modified and adapted for use in the engineered AAV capsid system of the present invention. Advantages of using one or more features from the FVs in the hybrid-adenoviral vector or system thereof can include the ability of the viral particles produced therefrom to infect a broad range of cells, a large packaging capacity as compared to other retroviruses, and the ability to persist in quiescent (non-dividing) cells. See also e.g., Ehrhardt et al. 2007. Mol. Ther. 156:146-156 and Shuji et al. 2011. Mol. Ther. 19:76-82, whose techniques and vectors described therein can be modified and adapted for use in the engineered targeting moiety, polypeptide, viral (e.g., AAV) capsid system of the present invention.

### Adeno Associated Vectors

[0389] In an embodiment, the engineered vector or system thereof can be an adeno-associated vector (AAV). See, e.g., West et al., Virology 160:38-47 (1987); U.S. Pat. No. 4,797,368; WO 93/24641; Kotin, Human Gene Therapy 5:793-801 (1994); and Muzyczka, J. Clin. Invest. 94:1351 (1994). Although similar to adenoviral vectors in some of their features, AAVs have some deficiency in their replication and/or pathogenicity and thus can be safer that adenoviral vectors. In some embodiments the AAV can integrate into a specific site on chromosome 19 of a human cell with no observable side effects. In some embodiments, the capacity of the AAV vector, system thereof, and/or AAV particles can be up to about 4.7 kb. The AAV vector or system thereof can include one or more engineered capsid polynucleotides described herein.

[0390] The AAV vector or system thereof can include one or more regulatory molecules. In some embodiments the regulatory molecules can be promoters, enhancers, repressors and the like, which are described in greater detail elsewhere herein. In some embodiments, the AAV vector or system thereof can include one or more polynucleotides that can encode one or more regulatory proteins. In some embodiments, the one or more regulatory proteins can be selected from Rep78, Rep68, Rep52, Rep40, variants thereof, and combinations thereof. In some embodiments, the promoter can be a tissue specific promoter as previously discussed. In some embodiments, the tissue specific promoter can drive expression of an engineered capsid AAV capsid polynucleotide described herein.

[0391] The AAV vector or system thereof can include one or more polynucleotides that can encode one or more capsid proteins, such as the engineered AAV capsid proteins described elsewhere herein. The engineered capsid proteins can be capable of assembling into a protein shell (an engineered capsid) of the AAV virus particle. The engineered capsid can have a cell-, tissue- and/or organ-specific tropism.

[0392] In some embodiments, the AAV vector or system thereof can include one or more adenovirus helper factors or polynucleotides that can encode one or more adenovirus helper factors. Such adenovirus helper factors can include, but are not limited, E1A, E1B, E2A, E40RF6, and VA RNAs. In some embodiments, a producing host cell line expresses one or more of the adenovirus helper factors.

[0393] The AAV vector or system thereof can be configured to produce AAV particles having a specific serotype. In some embodiments, the serotype can be AAV-1, AAV-2, AAV-3, AAV-4, AAV-5, AAV-6, AAV-8, AAV-9 or any combinations thereof. In some embodiments, the AAV can be AAV1, AAV-2, AAV-5, AAV-9 or any combination thereof. One can select the AAV of the AAV with regard to the cells to be targeted; e.g., one can select AAV serotypes 1, 2, 5, 9 or a hybrid capsid AAV-1, AAV-2, AAV-5, AAV-9 or any combination thereof for targeting brain and/or neuronal cells; and one can select AAV-4 for targeting cardiac tissue; and one can select AAV-8 for delivery to the liver. Thus, in some embodiments, an AAV vector or system thereof capable of producing AAV particles capable of targeting the brain and/or neuronal cells can be configured to generate AAV particles having serotypes 1, 2, 5 or a hybrid capsid AAV-1, AAV-2, AAV-5 or any combination thereof. In some embodiments, an AAV vector or system thereof capable of producing AAV particles capable of targeting cardiac tissue can be configured to generate an AAV particle having an AAV-4 serotype. In some embodiments, an AAV vector or system thereof capable of producing AAV particles capable of targeting the liver can be configured to generate an AAV having an AAV-8 serotype. See also Srivastava. 2017. Curr. Opin. Virol. 21:75-80.

[0394] It will be appreciated that while the different serotypes can provide some level of cell, tissue, and/or organ specificity, each serotype still is multi-tropic and thus can result in tissue-toxicity if using that serotype to target a tissue that the serotype is less efficient in transducing. Thus, in addition to achieving some tissue targeting capacity via selecting an AAV of a particular serotype, it will be appreciated that the tropism of the AAV serotype can be modified by an engineered AAV capsid described herein. As described elsewhere herein, variants of wild-type AAV of any serotype can be generated via a method described herein and determined to have a particular cell-specific tropism, which can be the same or different as that of the reference wild-type AAV serotype. In some embodiments, the cell, tissue, and/or specificity of the wild-type serotype can be enhanced (e.g., made more selective or specific for a particular cell type that the serotype is already biased towards). For example, wild-type AAV-9 is biased towards muscle and brain in humans (see e.g., Srivastava. 2017. Curr. Opin. Virol. 21:75-80.) By including an engineered AAV capsid and/or capsid protein variant of wild-type AAV-9 as described herein, the bias for e.g., muscle (or other non-CNS tissue or cell) can be reduced or eliminated and/or the CNS tissue or cell specificity increased such that the muscle (or other non-CNS tissue or cell) specificity appears reduced in comparison, thus enhancing the specificity for the CNS tissue or cell as compared to the wild-type AAV-9. As previously mentioned, inclusion of an engineered capsid and/or capsid protein variant of a wild-type AAV serotype can have a different tropism than the wild-type reference AAV serotype. For example, an engineered AAV capsid and/or capsid protein variant of AAV-9 can have specificity for a tissue other than muscle or brain in humans.

[0395] In some embodiments, the AAV vector is a hybrid AAV vector or system thereof. Hybrid AAVs are AAVs that include genomes with elements from one serotype that are packaged into a capsid derived from at least one different serotype. For example, if it is the rAAV2/5 that is to be produced, and if the production method is based on the helper-free, transient transfection method discussed above, the 1st plasmid and the 3rd plasmid (the adeno helper plasmid) will be the same as discussed for rAAV2 production. However, the 2nd plasmid, the pRepCap will be different. In this plasmid, called pRep2/Cap5, the Rep gene is still derived from AAV2, while the Cap gene is derived from AAV5. The production scheme is the same as the above-mentioned approach for AAV2 production. The resulting rAAV is called rAAV2/5, in which the genome is based on recombinant AAV2, while the capsid is based on AAV5. It is assumed the cell or tissue-tropism displayed by this AAV2/5 hybrid virus should be the same as that of AAV5. It will be appreciated that wild-type hybrid AAV particles suffer the same specificity issues as with the non-hybrid wild-type serotypes previously discussed.

[0396] Advantages achieved by the wild-type based hybrid AAV systems can be combined with the increased and customizable cell-specificity that can be achieved with the engineered AAV capsids can be combined by generating a hybrid AAV that can include an engineered AAV capsid described elsewhere herein. It will be appreciated that hybrid AAVs can contain an engineered AAV capsid containing a genome with elements from a different serotype than the reference wild-type serotype that the engineered AAV capsid is a variant of. For example, a hybrid AAV can be produced that includes an engineered AAV capsid that is a variant of an AAV-9 serotype that is used to package a genome that contains components (e.g., rep elements) from an AAV-2 serotype. As with wild-type based hybrid AAVs previously discussed, the tropism of the resulting AAV particle will be that of the engineered AAV capsid.

[0397] A tabulation of certain wild-type AAV serotypes as to these cells can be found in Grimm, D. et al, J. Virol. 82: 5887-5911 (2008) reproduced below as Table 1. Further tropism details can be found in Srivastava. 2017. Curr. Opin. Virol. 21:75-80 as previously discussed.

TABLE 1

| Cell Line | AAV-1 | AAV-2 | AAV-3 | AAV-4 | AAV-5 | AAV-6 | AAV-8 | AAV-9 |
|---|---|---|---|---|---|---|---|---|
| Huh-7 | 13 | 100 | 2.5 | 0.0 | 0.1 | 10 | 0.7 | 0.0 |
| HEK293 | 25 | 100 | 2.5 | 0.1 | 0.1 | 5 | 0.7 | 0.1 |
| HeLa | 3 | 100 | 2.0 | 0.1 | 6.7 | 1 | 0.2 | 0.1 |
| HepG2 | 3 | 100 | 16.7 | 0.3 | 1.7 | 5 | 0.3 | ND |
| Hep1A | 20 | 100 | 0.2 | 1.0 | 0.1 | 1 | 0.2 | 0.0 |
| 911 | 17 | 100 | 11 | 0.2 | 0.1 | 17 | 0.1 | ND |
| CHO | 100 | 100 | 14 | 1.4 | 333 | 50 | 10 | 1.0 |
| COS | 33 | 100 | 33 | 3.3 | 5.0 | 14 | 2.0 | 0.5 |
| MeWo | 10 | 100 | 20 | 0.3 | 6.7 | 10 | 1.0 | 0.2 |
| NIH3T3 | 10 | 100 | 2.9 | 2.9 | 0.3 | 10 | 0.3 | ND |
| A549 | 14 | 100 | 20 | ND | 0.5 | 10 | 0.5 | 0.1 |
| HT1180 | 20 | 100 | 10 | 0.1 | 0.3 | 33 | 0.5 | 0.1 |
| Monocytes | 1111 | 100 | ND | ND | 125 | 1429 | ND | ND |
| Immature DC | 2500 | 100 | ND | ND | 222 | 2857 | ND | ND |
| Mature DC | 2222 | 100 | ND | ND | 333 | 3333 | ND | ND |

[0398] In some embodiments, the AAV vector or system thereof is AAV rh.74 or AAV rh.10.

[0399] In some embodiments, the AAV vector or system thereof is configured as a “gutless” vector, similar to that described in connection with a retroviral vector. In some embodiments, the “gutless” AAV vector or system thereof can have the cis-acting viral DNA elements involved in genome amplification and packaging in linkage with the heterologous sequences of interest (e.g., the engineered AAV capsid polynucleotide(s)).

### Vector Construction

[0400] The vectors described herein can be constructed using any suitable process or technique. In some embodiments, one or more suitable recombination and/or cloning methods or techniques can be used to the vector(s) described herein. Suitable recombination and/or cloning techniques and/or methods can include, but not limited to, those described in U.S. Application publication No. US 2004-0171156 A1. Other suitable methods and techniques are described elsewhere herein.

[0401] Construction of recombinant AAV vectors are described in a number of publications, including U.S. Pat. No. 5,173,414; Tratschin et al., Mol. Cell. Biol. 5:3251-3260 (1985); Tratschin, et al., Mol. Cell. Biol. 4:2072-2081 (1984); Hermonat & Muzyczka, PNAS 81:6466-6470 (1984); and Samulski et al., J. Virol. 63:03822-3828 (1989). Any of the techniques and/or methods can be used and/or adapted for constructing an AAV or other vector described herein. AAV vectors are discussed elsewhere herein.

[0402] In some embodiments, the vector can have one or more insertion sites, such as a restriction endonuclease recognition sequence (also referred to as a “cloning site”). In some embodiments, one or more insertion sites (e.g., about or more than about 1, 2, 3, 4, 5, 6, 7, 8, 9, 10, or more insertion sites) are located upstream and/or downstream of one or more sequence elements of one or more vectors.

[0403] Delivery vehicles, vectors, particles, nanoparticles, formulations and components thereof for expression of one or more elements of an engineered AAV capsid system described herein are as used in the foregoing documents, such as WO 2014/093622 (PCT/US2013/074667) and are discussed in greater detail herein.

Virus Particle Production from Viral Vectors

### AAV Particle Production

[0404] There are two main strategies for producing AAV particles from AAV vectors and systems thereof, such as those described herein, which depend on how the adenovirus helper factors are provided (helper v. helper free). In some embodiments, a method of producing AAV particles from AAV vectors and systems thereof can include adenovirus infection into cell lines that stably harbor AAV replication and capsid encoding polynucleotides along with AAV vector containing the polynucleotide to be packaged and delivered by the resulting AAV particle (e.g., the engineered AAV capsid polynucleotide(s)). In some embodiments, a method of producing AAV particles from AAV vectors and systems thereof can be a “helper free” method, which includes co-transfection of an appropriate producing cell line with three vectors (e.g., plasmid vectors): (1) an AAV vector that contains a polynucleotide of interest (e.g., the engineered AAV capsid polynucleotide(s)) between 2 ITRs; (2) a vector that carries the AAV Rep-Cap encoding polynucleotides; and (helper polynucleotides. One of skill in the art will appreciate various methods and variations thereof that are both helper and -helper free and as well as the different advantages of each system.

[0405] The engineered AAV vectors and systems thereof described herein can be produced by any of these methods.

### Vector and Virus Particle Delivery

[0406] A vector (including non-viral carriers) described herein can be introduced into host cells to thereby produce transcripts, proteins, or peptides, including fusion proteins or peptides encoded by nucleic acids as described herein (e.g., engineered AAV capsid system transcripts, proteins, enzymes, mutant forms thereof, fusion proteins thereof, etc.), and virus particles (such as from viral vectors and systems thereof).

[0407] One or more engineered AAV capsid polynucleotides can be delivered using adeno associated virus (AAV), adenovirus or other plasmid or viral vector types as previously described, in particular, using formulations and doses from, for example, U.S. Pat. No. 8,454,972 (formulations, doses for adenovirus), U.S. Pat. No. 8,404,658 (formulations, doses for AAV) and U.S. Pat. No. 5,846,946 (formulations, doses for DNA plasmids) and from clinical trials and publications regarding the clinical trials involving lentivirus, AAV and adenovirus. For examples, for AAV, the route of administration, formulation and dose can be as in U.S. Pat. No. 8,454,972 and as in clinical trials involving AAV. For Adenovirus, the route of administration, formulation and dose can be as in U.S. Pat. No. 8,404,658 and as in clinical trials involving adenovirus.

[0408] For plasmid delivery, the route of administration, formulation and dose can be as in U.S. Pat. No. 5,846,946 and as in clinical studies involving plasmids. In some embodiments, doses can be based on or extrapolated to an average 70 kg individual (e.g., a male adult human), and can be adjusted for patients, subjects, mammals of different weight and species. Frequency of administration is within the ambit of the medical or veterinary practitioner (e.g., physician, veterinarian), depending on usual factors including the age, sex, general health, other conditions of the patient or subject and the particular condition or symptoms being addressed. The viral vectors can be injected into or otherwise delivered to the tissue or cell of interest.

[0409] In terms of in vivo delivery, AAV is advantageous over other viral vectors for a couple of reasons such as low toxicity (this may be due to the purification method not requiring ultra-centrifugation of cell particles that can activate the immune response) and a low probability of causing insertional mutagenesis because it doesn't integrate into the host genome.

[0410] The vector(s) and virus particles described herein can be delivered into a host cell in vitro, in vivo, and or ex vivo. Delivery can occur by any suitable method including, but not limited to, physical methods, chemical methods, and biological methods. Physical delivery methods are those methods that employ physical force to counteract the membrane barrier of the cells to facilitate intracellular delivery of the vector. Suitable physical methods include, but are not limited to, needles (e.g., injections), ballistic polynucleotides (e.g., particle bombardment, micro projectile gene transfer, and gene gun), electroporation, sonoporation, photoporation, magnetofection, hydroporation, and mechanical massage. Chemical methods are those methods that employ a chemical to elicit a change in the cells membrane permeability or other characteristic(s) to facilitate entry of the vector into the cell. For example, the environmental pH can be altered which can elicit a change in the permeability of the cell membrane. Biological methods are those that rely and capitalize on the host cell's biological processes or biological characteristics to facilitate transport of the vector (with or without a carrier) into a cell. For example, the vector and/or its carrier can stimulate an endocytosis or similar process in the cell to facilitate uptake of the vector into the cell.

[0411] Delivery of engineered AAV capsid system components (e.g., polynucleotides encoding engineered AAV capsid and/or capsid proteins) to cells via particles. The term “particle” as used herein, refers to any suitable sized particles for delivery of the engineered AAV capsid system components described herein. Suitable sizes include macro-, micro-, and nano-sized particles. In some embodiments, any of the of the engineered AAV capsid system components (e.g., polypeptides, polynucleotides, vectors, and combinations thereof described herein) can be attached to, coupled to, integrated with, otherwise associated with one or more particles or component thereof as described herein. The particles described herein can then be administered to a cell or organism by an appropriate route and/or technique. In some embodiments, particle delivery can be selected and be advantageous for delivery of the polynucleotide or vector components. It will be appreciated that in embodiments, particle delivery can also be advantageous for other engineered capsid system molecules and formulations described elsewhere herein.

### Engineered Virus Particles Including an Engineered Viral Capsid

[0412] Also described herein are engineered virus particles (also referred to here and elsewhere herein as “engineered viral particles”) that can contain an engineered viral (e.g., AAV) capsid as described in detail elsewhere herein. Viral particles with an engineered AAV capsid are referred to herein as engineered AAV particles. It will be appreciated that the engineered viral (e.g., AAV) particles can be adenovirus-based particles, helper adenovirus-based particles, AAV-based particles, or hybrid adenovirus-based particles that contain at least one engineered AAV capsid proteins as previously described. An engineered AAV capsid is one that that contains one or more engineered AAV capsid proteins as are described elsewhere herein. In some embodiments, the engineered AAV particles can include 1-60 engineered AAV capsid proteins described herein. In some embodiments, the engineered AAV particles can contain 1, 2, 3, 4, 5, 6, 7, 8, 9, 10, 11, 12, 13, 14, 15, 16, 17, 18, 19, 20, 21, 22, 23, 24, 25, 26, 27, 28, 29, 30, 31, 32, 33, 34, 35, 36, 37, 38, 39, 40, 41, 42, 43, 44, 45, 46, 47, 48, 49, 50, 51, 52, 53, 54, 55, 56, 57, 58, 59, or 60 engineered capsid proteins. In some embodiments, the engineered AAV particles can contain 0-59 wild-type AAV capsid proteins. In some embodiments, the engineered AAV particles can contain 0, 1, 2, 3, 4, 5, 6, 7, 8, 9, 10, 11, 12, 13, 14, 15, 16, 17, 18, 19, 20, 21, 22, 23, 24, 25, 26, 27, 28, 29, 30, 31, 32, 33, 34, 35, 36, 37, 38, 39, 40, 41, 42, 43, 44, 45, 46, 47, 48, 49, 50, 51, 52, 53, 54, 55, 56, 57, 58, or 59 wild-type AAV capsid proteins. The engineered AAV particles can thus include one or more n-mer inserts as is previously described.

[0413] The engineered AAV particle can include one or more cargo polynucleotides. Cargo polynucleotides are discussed in greater detail elsewhere herein. Methods of making the engineered AAV particles from viral and non-viral vectors are described elsewhere herein. Formulations containing the engineered virus particles are described elsewhere herein.

[0414] The engineered viral (e.g., AAV) capsid polynucleotides, other viral (e.g., AAV) polynucleotide(s), and/or vector polynucleotides can contain one or more cargo polynucleotides. The cargo polynucleotides can encode one or more polypeptides. Exemplary cargos are described in greater detail elsewhere herein. It will be appreciated that when a cargo polypeptide is described that its encoding polynucleotide can be a cargo polynucleotide described in this context. In some embodiments, the one or more cargo polynucleotides can be operably linked to the engineered viral (e.g., AAV) capsid polynucleotide(s) and can be part of the engineered viral (e.g., AAV) genome of the viral (e.g., AAV) system of the present invention. The cargo polynucleotides can be packaged into an engineered viral (e.g., AAV) particle, which can be delivered to, e.g., a cell. In some embodiments, the cargo polynucleotide can be capable of modifying a polynucleotide (e.g., gene or transcript) of a cell to which it is delivered. As used herein, “gene” can refer to a hereditary unit corresponding to a sequence of DNA that occupies a specific location on a chromosome and that contains the genetic instruction for a characteristic(s) or trait(s) in an organism. The term gene can refer to translated and/or untranslated regions of a genome. “Gene” can refer to the specific sequence of DNA that is transcribed into an RNA transcript that can be translated into a polypeptide or be a catalytic RNA molecule, including but not limited to, tRNA, siRNA, piRNA, miRNA, long-non-coding RNA and shRNA. Polynucleotide, gene, transcript, etc. modification includes all genetic engineering techniques including, but not limited to, gene editing as well as conventional recombinational gene modification techniques (e.g., whole or partial gene insertion, deletion, and mutagenesis (e.g., insertional and deletional mutagenesis) techniques.

### Engineered Cells and Organisms Expressing Said Engineered Viral Capsids

[0415] Described herein are engineered cells that can include one or more of the engineered targeting moieties, polypeptides, viral (e.g., AAV) capsid polynucleotides, polypeptides, vectors, and/or vector systems described in greater detail elsewhere herein. In some embodiments, one or more of the engineered viral (e.g., AAV) capsid polynucleotides can be expressed in the engineered cells. In some embodiments, the engineered cells can be capable of producing engineered viral (e.g., AAV) capsid proteins and/or engineered viral (e.g., AAV) capsid particles that are described elsewhere herein. Also described herein are modified or engineered organisms that can include one or more engineered cells described herein. The engineered cells can be engineered to express a cargo molecule (e.g., a cargo polynucleotide) dependently or independently of an engineered viral (e.g., AAV) capsid polynucleotide as described elsewhere herein.

[0416] A wide variety of animals, plants, algae, fungi, yeast, etc. and animal, plant, algae, fungus, yeast cell or tissue systems may be engineered to express one or more nucleic acid constructs of the engineered targeting moiety, polypeptide, vector, viral (e.g., AAV) capsid system described herein using various transformation methods mentioned elsewhere herein. This can produce organisms that can produce engineered targeting moiety, polypeptide, vector, viral (e.g., AAV) capsid particles, such as for production purposes, engineered targeting moiety, polypeptide, vector, viral (e.g., AAV) capsid design and/or generation, and/or model organisms. In some embodiments, the polynucleotide(s) encoding one or more components of the engineered targeting moiety, polypeptide, vector, viral (e.g., AAV) capsid system described herein can be stably or transiently incorporated into one or more cells of a plant, animal, algae, fungus, and/or yeast or tissue system. In some embodiments, one or more of engineered targeting moiety, polypeptide, vector, viral (e.g., AAV) capsid system polynucleotides are genomically incorporated into one or more cells of a plant, animal, algae, fungus, and/or yeast or tissue system. Further embodiments of the modified organisms and systems are described elsewhere herein. In some embodiments, one or more components of the engineered targeting moiety, polypeptide, vector, viral (e.g., AAV) capsid system described herein are expressed in one or more cells of the plant, animal, algae, fungus, yeast, or tissue systems.

### Engineered Cells

[0417] Described herein are various embodiments of engineered cells that can include one or more of the engineered targeting moieties, polypeptide, vector, viral (e.g., AAV) capsid system polynucleotides, polypeptides, vectors, and/or vector systems described elsewhere herein. In some embodiments, the cells can express one or more of the engineered targeting moieties, polypeptide, vector, viral (e.g., AAV) capsid polynucleotides and can produce one or more engineered targeting moiety, polypeptide, vector, viral (e.g., AAV) capsid particles, which are described in greater detail herein. Such cells are also referred to herein as “producer cells”. It will be appreciated that these engineered cells are different from “modified cells” described elsewhere herein in that the modified cells are not necessarily producer cells (i.e. they do not make engineered viral (e.g., AAV) particles) unless they include one or more of the engineered targeting moiety, polypeptide, viral (e.g., AAV) capsid polynucleotides, engineered targeting moiety, polypeptide, viral (e.g., AAV) capsid vectors or other vectors described herein that render the cells capable of producing an engineered viral (e.g., AAV) capsid particle or other particles described herein. Modified cells can be recipient cells of an engineered viral (e.g., AAV) capsid particles and can, in some embodiments, be modified by the engineered viral (e.g., AAV) capsid particle(s) and/or a cargo polynucleotide delivered to the recipient cell. Modified cells are discussed in greater detail elsewhere herein. The term modification can be used in connection with modification of a cell that is not dependent on being a recipient cell. For example, isolated cells can be modified prior to receiving an engineered targeting moiety, polypeptide, viral (e.g., AAV) capsid molecule.

[0418] In an embodiment, the invention provides a non-human eukaryotic organism; for example, a multicellular eukaryotic organism, including a eukaryotic host cell containing one or more components of an engineered delivery system described herein according to any of the described embodiments. In other embodiments, the invention provides a eukaryotic organism; preferably a multicellular eukaryotic organism, comprising a eukaryotic host cell containing one or more components of an engineered delivery system described herein according to any of the described embodiments. In some embodiments, the organism is a host of a virus (e.g., an AAV).

[0419] In particular embodiments, the plants, algae, fungi, yeast, etc., cells or parts obtained are transgenic plants, comprising an exogenous DNA sequence incorporated into the genome of all or part of the cells.

[0420] The engineered cell can be a prokaryotic cell. The prokaryotic cell can be bacterial cell. The prokaryotic cell can be an archaea cell. The bacterial cell can be any suitable bacterial cell. Suitable bacterial cells can be from the genus Escherichia, Bacillus, Lactobacillus, Rhodococcus, Rodhobacter, Synechococcus, Synechoystis, Pseudomonas, Psedoaltermonas, Stenotrophamonas, and Streptomyces Suitable bacterial cells include, but are not limited to Escherichia coli cells, Caulobacter crescentus cells, Rodhobacter sphaeroides cells, Psedoaltermonas haloplanktis cells. Suitable strains of bacterial include, but are not limited to BL21(DE3), DL21(DE3)-pLysS, BL21 Star-pLysS, BL21-SI, BL21-AI, Tuner, Tuner pLysS, Origami, Origami B pLysS, Rosetta, Rosetta pLysS, Rosetta-gami-pLysS, BL21 CodonPlus, AD494, BL2trxB, HMS174, NovaBlue(DE3), BLR, C41(DE3), C43(DE3), Lemo21(DE3), Shuffle T7, ArcticExpress and ArticExpress (DE3).

[0421] The engineered cell can be a eukaryotic cell. The eukaryotic cells may be those of or derived from a particular organism, such as a plant or a mammal, including but not limited to human, or non-human eukaryote or animal or mammal as herein discussed, e.g., mouse, rat, rabbit, dog, livestock, or non-human mammal or primate. In some embodiments the engineered cell can be a cell line. Examples of cell lines include, but are not limited to, C8161, CCRF-CEM, MOLT, mIMCD-3, NHDF, HeLa-S3, Huh1, Huh4, Huh7, HUVEC, HASMC, HEKn, HEKa, MiaPaCell, Pane1, PC-3, TF1, CTLL-2, CIR, Rat6, CV1, RPTE, A10, T24, J82, A375, ARH-77, Calul, SW480, SW620, SKOV3, SK-UT, CaCo2, P388D1, SEM-K2, WEHI-231, HB56, TIB55, Jurkat, J45.01, LRMB, Bcl-1, BC-3, IC21, DLD2, Raw264.7, NRK, NRK-52E, MRC5, MEF, Hep G2, HeLa B, HeLa T4, COS, COS-1, COS-6, COS-M6A, BS-C-1 monkey kidney epithelial, BALB/3T3 mouse embryo fibroblast, 3T3 Swiss, 3T3-L1, 132-d5 human fetal fibroblasts; 10.1 mouse fibroblasts, 293-T, 3T3, 721, 9L, A2780, A2780ADR, A2780cis, A172, A20, A253, A431, A-549, ALC, B16, B35, BCP-1 cells, BEAS-2B, bEnd.3, BHK-21, BR 293, BxPC3, C3H-10T1/2, C6/36, Cal-27, CHO, CHO-7, CHO-IR, CHO-K1, CHO-K2, CHO-T, CHO Dhfr −/−, COR-L23, COR-L23/CPR, COR-L23/5010, COR-L23/R23, COS-7, COV-434, CML T1, CMT, CT26, D17, DH82, DU145, DuCaP, EL4, EM2, EM3, EMT6/AR1, EMT6/AR10.0, FM3, H1299, H69, HB54, HB55, HCA2, HEK-293, HeLa, Hepalclc7, HL-60, HMEC, HT-29, Jurkat, JY cells, K562 cells, Ku812, KCL22, KG1, KYO1, LNCap, Ma-Mel 1-48, MC-38, MCF-7, MCF-10A, MDA-MB-231, MDA-MB-468, MDA-MB-435, MDCK II, MDCK II, MOR/0.2R, MONO-MAC 6, MTD-1A, MyEnd, NCI-H69/CPR, NCI-H69/LX10, NCI-H69/LX20, NCI-H69/LX4, NIH-3T3, NALM-1, NW-145, OPCN/OPCT cell lines, Peer, PNT-1A/PNT 2, RenCa, RIN-5F, RMA/RMAS, Saos-2 cells, Sf-9, SkBr3, T2, T-47D, T84, THP1 cell line, U373, U87, U937, VCaP, Vero cells, WM39, WT-49, X63, YAC-1, YAR, and transgenic varieties thereof. Cell lines are available from a variety of sources known to those with skill in the art (see, e.g., the American Type Culture Collection (ATCC) (Manassas, Va.)).

[0422] In some embodiments, the engineered cell is a muscle cell (e.g., cardiac muscle, skeletal muscle, and/or smooth muscle), bone cell, blood cell, immune cell (including but not limited to B cells, macrophages, T-cells, CAR-T cells, and the like), kidney cells, bladder cells, lung cells, heart cells, liver cells, brain cells, neurons, skin cells, stomach cells, neuronal support cells, intestinal cells, epithelial cells, endothelial cells, stem or other progenitor cells, adrenal gland cells, cartilage cells, and combinations thereof.

[0423] In some embodiments, the engineered cell can be a fungus cell. As used herein, a “fungal cell” refers to any type of eukaryotic cell within the kingdom of fungi. Phyla within the kingdom of fungi include Ascomycota, Basidiomycota, Blastocladiomycota, Chytridiomycota, Glomeromycota, Microsporidia, and Neocallimastigomycota. Fungal cells may include yeasts, molds, and filamentous fungi. In some embodiments, the fungal cell is a yeast cell.

[0424] As used herein, the term “yeast cell” refers to any fungal cell within the phyla Ascomycota and Basidiomycota. Yeast cells may include budding yeast cells, fission yeast cells, and mold cells. Without being limited to these organisms, many types of yeast used in laboratory and industrial settings are part of the phylum Ascomycota. In some embodiments, the yeast cell is an S. cerevisiae, Kluyveromyces marxianus, or Issatchenkia orientalis cell. Other yeast cells may include without limitation Candida spp. (e.g., Candida albicans), Yarrowia spp. (e.g., Yarrowia lipolytica), Pichia spp. (e.g., Pichia pastoris), Kluyveromyces spp. (e.g., Kluyveromyces lactis and Kluyveromyces marxianus), Neurospora spp. (e.g., Neurospora crassa), Fusarium spp. (e.g., Fusarium oxysporum), and Issatchenkia spp. (e.g., Issatchenkia orientalis, a.k.a. Pichia kudriavzevii and Candida acidothermophilum). In some embodiments, the fungal cell is a filamentous fungal cell. As used herein, the term “filamentous fungal cell” refers to any type of fungal cell that grows in filaments, i.e., hyphae or mycelia. Examples of filamentous fungal cells may include without limitation Aspergillus spp. (e.g., Aspergillus niger), Trichoderma spp. (e.g., Trichoderma reesei), Rhizopus spp. (e.g., Rhizopus oryzae), and Mortierella spp. (e.g., Mortierella isabellina).

[0425] In some embodiments, the fungal cell is an industrial strain. As used herein, “industrial strain” refers to any strain of fungal cell used in or isolated from an industrial process, e.g., production of a product on a commercial or industrial scale. Industrial strain may refer to a fungal species that is typically used in an industrial process, or it may refer to an isolate of a fungal species that may be also used for non-industrial purposes (e.g., laboratory research). Examples of industrial processes may include fermentation (e.g., in production of food or beverage products), distillation, biofuel production, production of a compound, and production of a polypeptide. Examples of industrial strains can include, without limitation, JAY270 and ATCC4124.

[0426] In some embodiments, the fungal cell is a polyploid cell. As used herein, a “polyploid” cell may refer to any cell whose genome is present in more than one copy. A polyploid cell may refer to a type of cell that is naturally found in a polyploid state, or it may refer to a cell that has been induced to exist in a polyploid state (e.g., through specific regulation, alteration, inactivation, activation, or modification of meiosis, cytokinesis, or DNA replication). A polyploid cell may refer to a cell whose entire genome is polyploid, or it may refer to a cell that is polyploid in a particular genomic locus of interest.

[0427] In some embodiments, the fungal cell is a diploid cell. As used herein, a “diploid” cell may refer to any cell whose genome is present in two copies. A diploid cell may refer to a type of cell that is naturally found in a diploid state, or it may refer to a cell that has been induced to exist in a diploid state (e.g., through specific regulation, alteration, inactivation, activation, or modification of meiosis, cytokinesis, or DNA replication). For example, the S. cerevisiae strain S228C may be maintained in a haploid or diploid state. A diploid cell may refer to a cell whose entire genome is diploid, or it may refer to a cell that is diploid in a particular genomic locus of interest. In some embodiments, the fungal cell is a haploid cell. As used herein, a “haploid” cell may refer to any cell whose genome is present in one copy. A haploid cell may refer to a type of cell that is naturally found in a haploid state, or it may refer to a cell that has been induced to exist in a haploid state (e.g., through specific regulation, alteration, inactivation, activation, or modification of meiosis, cytokinesis, or DNA replication). For example, the S. cerevisiae strain S228C may be maintained in a haploid or diploid state. A haploid cell may refer to a cell whose entire genome is haploid, or it may refer to a cell that is haploid in a particular genomic locus of interest.

[0428] In some embodiments, the engineered cell is a cell obtained from a subject. In some embodiments, the subject is a healthy or non-diseased subject. In some embodiments, the subject is a subject with a desired physiological and/or biological characteristic such that when an engineered targeting moiety, polypeptide, vector, viral (e.g., AAV) capsid particle is produced it can package one or more cargo polynucleotides that can be related to the desired physiological and/or biological characteristic and/or capable of modifying the desired physiological and/or biological characteristic. Thus, the cargo polynucleotides of the produced engineered viral (e.g., AAV) or other particle can be capable of transferring the desired characteristic to a recipient cell. In some embodiments, the cargo polynucleotides are capable of modifying a polynucleotide of the engineered cell such that the engineered cell has a desired physiological and/or biological characteristic.

[0429] In some embodiments, a cell transfected with one or more vectors described herein is used to establish a new cell line comprising one or more vector-derived sequences.

[0430] The engineered cells can be used to produce engineered targeting moieties, polypeptides, viral (e.g., AAV) capsid polynucleotides, vectors, and/or particles. In some embodiments, the engineered targeting moieties, polypeptides, viral (e.g., AAV) capsid polynucleotides, vectors, and/or particles are produced, harvested, and/or delivered to a subject in need thereof. In some embodiments, the engineered cells are delivered to a subject. Other uses for the engineered cells are described elsewhere herein. In some embodiments, the engineered cells can be included in formulations and/or kits described elsewhere herein.

[0431] The engineered cells can be stored short-term or long-term for use at a later time. Suitable storage methods are generally known in the art. Further, methods of restoring the stored cells for use (such as thawing, reconstitution, and otherwise stimulating metabolism in the engineered cell after storage) at a later time are also generally known in the art.

### Formulations

[0432] Component(s) of the engineered targeting moieties, polypeptides, viral (e.g., AAV) capsid system, engineered cells, engineered viral (e.g., AAV) particles, and/or combinations thereof can be included in a formulation that can be delivered to a subject or a cell. In some embodiments, the formulation is a pharmaceutical formulation. One or more of the polypeptides, polynucleotides, vectors, cells, and combinations thereof described herein can be provided to a subject in need thereof or a cell alone or as an active ingredient, such as in a pharmaceutical formulation. As such, also described herein are pharmaceutical formulations containing an amount of one or more of the polypeptides, polynucleotides, vectors, cells, or combinations thereof described herein. In some embodiments, the pharmaceutical formulation can contain an effective amount of the one or more of the polypeptides, polynucleotides, vectors, cells, and combinations thereof described herein. The pharmaceutical formulations described herein can be administered to a subject in need thereof or a cell.

[0433] In some embodiments, the amount of the one or more of the polypeptides, polynucleotides, vectors, cells, virus particles, nanoparticles, other delivery particles, and combinations thereof described herein contained in the pharmaceutical formulation can range from about 1 μg/kg to about 10 mg/kg based upon the bodyweight of the subject in need thereof or average bodyweight of the specific patient population to which the pharmaceutical formulation can be administered. The amount of the one or more of the polypeptides, polynucleotides, vectors, cells, and combinations thereof described herein in the pharmaceutical formulation can range from about 1 μg to about 10 g, from about 10 nL to about 10 ml. In embodiments where the pharmaceutical formulation contains one or more cells, the amount can range from about 1 cell to 1×10², 1×10³, 1×10⁴, 1×10⁵, 1×10⁶, 1×10⁷, 1×10⁸, 1×10⁹, 1×10¹⁰ or more cells. In embodiments where the pharmaceutical formulation contains one or more cells, the amount can range from about 1 cell to 1×10², 1×10³, 1×10⁴, 1×10⁵, 1×10⁶, 1×10⁷, 1×10⁸, 1×10⁹, 1×10¹⁰ or more cells per nL, uL, mL, or L.

[0434] In embodiments, were engineered AAV capsid particles are included in the formulation, the formulation can contain 1 to 1×10¹, 1×10², 1×10³, 1×10⁴, 1×10⁵, 1×10⁶, 1×10⁷, 1×10⁸, 1×10⁹, 1×10¹⁰, 1×10¹¹, 1×10¹², 1×10¹³, 1×10¹⁴, 1×10¹⁵, 1×10¹⁶, 1×10¹⁷, 1×10¹⁸, 1×10¹⁹, or 1×10²⁰ transducing units (TU)/mL of the engineered AAV capsid particles. In some embodiments, the formulation can be 0.1 to 100 mL in volume and can contain 1 to 1×10¹, 1×10², 1×10³, 1×10⁴, 1×10⁵, 1×10⁶, 1×10⁷, 1×10⁸, 1×10⁹, 1×10¹⁰, 1×10¹¹, 1×10¹², 1×10¹³, 1×10¹⁴, 1×10¹⁵, 1×10¹⁶, 1×10¹⁷, 1×10¹⁸, 1×10¹⁹, or 1×10²⁰ transducing units (TU)/mL of the engineered AAV capsid particles.

### Pharmaceutically Acceptable Carriers and Auxiliary Ingredients and Agents

[0435] In embodiments, the pharmaceutical formulation containing an amount of one or more of the polypeptides, polynucleotides, vectors, cells, virus particles, nanoparticles, other delivery particles, and combinations thereof described herein can further include a pharmaceutically acceptable carrier. Suitable pharmaceutically acceptable carriers include, but are not limited to, water, salt solutions, alcohols, gum arabic, vegetable oils, benzyl alcohols, polyethylene glycols, gelatin, carbohydrates such as lactose, amylose or starch, magnesium stearate, talc, silicic acid, viscous paraffin, perfume oil, fatty acid esters, hydroxy methylcellulose, and polyvinyl pyrrolidone, which do not deleteriously react with the active composition.

[0436] The pharmaceutical formulations can be sterilized, and if desired, mixed with auxiliary agents, such as lubricants, preservatives, stabilizers, wetting agents, emulsifiers, salts for influencing osmotic pressure, buffers, coloring, flavoring and/or aromatic substances, and the like which do not deleteriously react with the active composition.

[0437] In addition to an amount of one or more of the polypeptides, polynucleotides, vectors, cells, engineered viral (e.g. AAV) capsids, viral (e.g. AAV) or otherr particles, nanoparticles, other delivery particles, and combinations thereof described herein, the pharmaceutical formulation can also include an effective amount of an auxiliary active agent, including but not limited to, polynucleotides, amino acids, peptides, polypeptides, antibodies, aptamers, ribozymes, hormones, immunomodulators, antipyretics, anxiolytics, antipsychotics, analgesics, antispasmodics, anti-inflammatories, anti-histamines, anti-infectives, chemotherapeutics, and combinations thereof.

[0438] In embodiments where there is an auxiliary active agent contained in the pharmaceutical formulation in addition to the one or more of the polypeptides, polynucleotides, compositions, vectors, cells, virus particles, nanoparticles, other delivery particles, and combinations thereof described herein, amount, such as an effective amount, of the auxiliary active agent will vary depending on the auxiliary active agent. In some embodiments, the amount of the auxiliary active agent ranges from 0.001 micrograms to about 1 milligram. In other embodiments, the amount of the auxiliary active agent ranges from about 0.01 IU to about 1000 IU. In further embodiments, the amount of the auxiliary active agent ranges from 0.001 mL to about 1 mL. In yet other embodiments, the amount of the auxiliary active agent ranges from about 1% w/w to about 50% w/w of the total pharmaceutical formulation. In additional embodiments, the amount of the auxiliary active agent ranges from about 1% v/v to about 50% v/v of the total pharmaceutical formulation. In still other embodiments, the amount of the auxiliary active agent ranges from about 1% w/v to about 50% w/v of the total pharmaceutical formulation.

### Dosage Forms

[0439] In some embodiments, the pharmaceutical formulations described herein may be in a dosage form. The dosage forms can be adapted for administration by any appropriate route. Appropriate routes include, but are not limited to, oral (including buccal or sublingual), rectal, epidural, intracranial, intraocular, inhaled, intranasal, topical (including buccal, sublingual, or transdermal), vaginal, intraurethral, parenteral, intracranial, subcutaneous, intramuscular, intravenous, intraperitoneal, intradermal, intraosseous, intracardiac, intraarticular, intracavernous, intrathecal, intravitreal, intracerebral, gingival, subgingival, intracerebroventricular, and intradermal. Such formulations may be prepared by any method known in the art.

[0440] Dosage forms adapted for oral administration can be discrete dosage units such as capsules, pellets or tablets, powders or granules, solutions, or suspensions in aqueous or non-aqueous liquids; edible foams or whips, or in oil-in-water liquid emulsions or water-in-oil liquid emulsions. In some embodiments, the pharmaceutical formulations adapted for oral administration also include one or more agents which flavor, preserve, color, or help disperse the pharmaceutical formulation. Dosage forms prepared for oral administration can also be in the form of a liquid solution that can be delivered as foam, spray, or liquid solution. In some embodiments, the oral dosage form can contain about 1 ng to 1000 g of a pharmaceutical formulation containing a therapeutically effective amount or an appropriate fraction thereof of the targeted effector fusion protein and/or complex thereof or composition containing the one or more of the polypeptides, polynucleotides, vectors, cells, and combinations thereof described herein. The oral dosage form can be administered to a subject in need thereof.

[0441] Where appropriate, the dosage forms described herein can be microencapsulated.

[0442] The dosage form can also be prepared to prolong or sustain the release of any ingredient. In some embodiments, the one or more of the polypeptides, polynucleotides, vectors, cells, and combinations thereof described herein can be the ingredient whose release is delayed. In other embodiments, the release of an optionally included auxiliary ingredient is delayed. Suitable methods for delaying the release of an ingredient include, but are not limited to, coating or embedding the ingredients in material in polymers, wax, gels, and the like. Delayed release dosage formulations can be prepared as described in standard references such as “Pharmaceutical dosage form tablets,” eds. Liberman et. al. (New York, Marcel Dekker, Inc., 1989), “Remington—The science and practice of pharmacy”, 20th ed., Lippincott Williams & Wilkins, Baltimore, MD, 2000, and “Pharmaceutical dosage forms and drug delivery systems”, 6th Edition, Ansel et al., (Media, PA: Williams and Wilkins, 1995). These references provide information on excipients, materials, equipment, and processes for preparing tablets and capsules and delayed release dosage forms of tablets and pellets, capsules, and granules. The delayed release can be anywhere from about an hour to about 3 months or more.

[0443] Examples of suitable coating materials include, but are not limited to, cellulose polymers such as cellulose acetate phthalate, hydroxypropyl cellulose, hydroxypropyl methylcellulose, hydroxypropyl methylcellulose phthalate, and hydroxypropyl methylcellulose acetate succinate; polyvinyl acetate phthalate, acrylic acid polymers and copolymers, and methacrylic resins that are commercially available under the trade name EUDRAGIT® (Roth Pharma, Westerstadt, Germany), zein, shellac, and polysaccharides.

[0444] Coatings may be formed with a different ratio of water-soluble polymer, water insoluble polymers, and/or pH dependent polymers, with or without water insoluble/water soluble non-polymeric excipient, to produce the desired release profile. The coating is either performed on the dosage form (matrix or simple) which includes, but is not limited to, tablets (compressed with or without coated beads), capsules (with or without coated beads), beads, particle compositions, “ingredient as is” formulated as, but not limited to, suspension form or as a sprinkle dosage form.

[0445] Dosage forms adapted for topical administration can be formulated as ointments, creams, suspensions, lotions, powders, solutions, pastes, gels, sprays, aerosols, or oils. In some embodiments for treatments of the eye or other external tissues, for example the mouth or the skin, the pharmaceutical formulations are applied as a topical ointment or cream. When formulated in an ointment, the one or more of the polypeptides, polynucleotides, vectors, cells, and combinations thereof described herein can be formulated with a paraffinic or water-miscible ointment base. In some embodiments, the active ingredient can be formulated in a cream with an oil-in-water cream base or a water-in-oil base. Dosage forms adapted for topical administration in the mouth include lozenges, pastilles, and mouth washes.

[0446] Dosage forms adapted for nasal or inhalation administration include aerosols, solutions, suspension drops, gels, or dry powders. In some embodiments, the one or more of the polypeptides, polynucleotides, vectors, cells, and combinations thereof described herein is contained in a dosage form adapted for inhalation is in a particle-size-reduced form that is obtained or obtainable by micronization. In some embodiments, the particle size of the size reduced (e.g., micronized) compound or salt or solvate thereof, is defined by a D50 value of about 0.5 to about 10 microns as measured by an appropriate method known in the art. Dosage forms adapted for administration by inhalation also include particle dusts or mists. Suitable dosage forms wherein the carrier or excipient is a liquid for administration as a nasal spray or drops include aqueous or oil solutions/suspensions of an active ingredient (e.g., the one or more of the polypeptides, polynucleotides, vectors, cells, and combinations thereof described herein and/or auxiliary active agent), which may be generated by various types of metered dose pressurized aerosols, nebulizers, or insufflators.

[0447] In some embodiments, the dosage forms can be aerosol formulations suitable for administration by inhalation. In some of these embodiments, the aerosol formulation can contain a solution or fine suspension of the one or more of the polypeptides, polynucleotides, vectors, cells, and combinations thereof described herein and a pharmaceutically acceptable aqueous or non-aqueous solvent. Aerosol formulations can be presented in single or multi-dose quantities in sterile form in a sealed container. For some of these embodiments, the sealed container is a single dose or multi-dose nasal or an aerosol dispenser fitted with a metering valve (e.g., metered dose inhaler), which is intended for disposal once the contents of the container have been exhausted.

[0448] Where the aerosol dosage form is contained in an aerosol dispenser, the dispenser contains a suitable propellant under pressure, such as compressed air, carbon dioxide, or an organic propellant, including but not limited to a hydrofluorocarbon. The aerosol formulation dosage forms in other embodiments are contained in a pump-atomizer. The pressurized aerosol formulation can also contain a solution or a suspension of one or more of the polypeptides, polynucleotides, vectors, cells, and combinations thereof described herein. In further embodiments, the aerosol formulation can also contain co-solvents and/or modifiers incorporated to improve, for example, the stability and/or taste and/or fine particle mass characteristics (amount and/or profile) of the formulation. Administration of the aerosol formulation can be once daily or several times daily, for example 2, 3, 4, or 8 times daily, in which 1, 2, or 3 doses are delivered each time.

[0449] For some dosage forms suitable and/or adapted for inhaled administration, the pharmaceutical formulation is a dry powder inhalable formulation. In addition to the one or more of the polypeptides, polynucleotides, vectors, cells, and combinations thereof described herein, an auxiliary active ingredient, and/or pharmaceutically acceptable salt thereof, such a dosage form can contain a powder base such as lactose, glucose, trehalose, manitol, and/or starch. In some of these embodiments, the one or more of the polypeptides, polynucleotides, vectors, cells, and combinations thereof described herein is in a particle-size reduced form. In further embodiments, a performance modifier, such as L-leucine or another amino acid, cellobiose octaacetate, and/or metals salts of stearic acid, such as magnesium or calcium stearate.

[0450] In some embodiments, the aerosol dosage forms can be arranged so that each metered dose of aerosol contains a predetermined amount of an active ingredient, such as the one or more of the one or more of the polypeptides, polynucleotides, vectors, cells, and combinations thereof described herein.

[0451] Dosage forms adapted for vaginal administration can be presented as pessaries, tampons, creams, gels, pastes, foams, or spray formulations. Dosage forms adapted for rectal administration include suppositories or enemas.

[0452] Dosage forms adapted for parenteral administration and/or adapted for any type of injection (e.g., intravenous, intraperitoneal, subcutaneous, intramuscular, intradermal, intraosseous, epidural, intracardiac, intraarticular, intracavernous, gingival, subginigival, intrathecal, intravireal, intracerebral, and intracerebroventricular) can include aqueous and/or non-aqueous sterile injection solutions, which can contain anti-oxidants, buffers, bacteriostats, solutes that render the composition isotonic with the blood of the subject, and aqueous and non-aqueous sterile suspensions, which can include suspending agents and thickening agents. The dosage forms adapted for parenteral administration can be presented in a single-unit dose or multi-unit dose containers, including but not limited to sealed ampoules or vials. The doses can be lyophilized and resuspended in a sterile carrier to reconstitute the dose prior to administration. Extemporaneous injection solutions and suspensions can be prepared in some embodiments, from sterile powders, granules, and tablets.

[0453] Dosage forms adapted for ocular administration can include aqueous and/or nonaqueous sterile solutions that can optionally be adapted for injection, and which can optionally contain anti-oxidants, buffers, bacteriostats, solutes that render the composition isotonic with the eye or fluid contained therein or around the eye of the subject, and aqueous and nonaqueous sterile suspensions, which can include suspending agents and thickening agents.

[0454] For some embodiments, the dosage form contains a predetermined amount of the one or more of the polypeptides, polynucleotides, vectors, cells, and combinations thereof described herein per unit dose. In some embodiments, the predetermined amount of the Such unit doses may therefore be administered once or more than once a day. Such pharmaceutical formulations may be prepared by any of the methods well known in the art.

### Kits

[0455] Also described herein are kits that contain one or more of the one or more of the polypeptides, polynucleotides, vectors, cells, or other components described herein and combinations thereof and pharmaceutical formulations described herein. In embodiments, one or more of the polypeptides, polynucleotides, vectors, cells, and combinations thereof described herein can be presented as a combination kit. As used herein, the terms “combination kit” or “kit of parts” refers to the compounds, or formulations and additional components that are used to package, screen, test, sell, market, deliver, and/or administer the combination of elements or a single element, such as the active ingredient, contained therein. Such additional components include but are not limited to, packaging, syringes, blister packages, bottles, and the like. The combination kit can contain one or more of the components (e.g., one or more of the one or more of the polypeptides, polynucleotides, vectors, cells, and combinations thereof) or formulation thereof can be provided in a single formulation (e.g., a liquid, lyophilized powder, etc.), or in separate formulations. The separate components or formulations can be contained in a single package or in separate packages within the kit. The kit can also include instructions in a tangible medium of expression that can contain information and/or directions regarding the content of the components and/or formulations contained therein, safety information regarding the content of the components(s) and/or formulation(s) contained therein, information regarding the amounts, dosages, indications for use, screening methods, component design recommendations and/or information, recommended treatment regimen(s) for the components(s) and/or formulations contained therein. As used herein, “tangible medium of expression” refers to a medium that is physically tangible or accessible and is not a mere abstract thought or an unrecorded spoken word. “Tangible medium of expression” includes, but is not limited to, words on a cellulosic or plastic material, or data stored in a suitable computer readable memory form. The data can be stored on a unit device, such as a flash memory drive or CD-ROM or on a server that can be accessed by a user via, e.g., a web interface.

[0456] In one embodiment, the invention provides a kit comprising one or more of the components described herein. In some embodiments, the kit comprises a vector system and instructions for using the kit. In some embodiments, the vector system includes a regulatory element operably linked to one or more engineered targeting moiety, polypeptide, viral (e.g., AAV) delivery system polynucleotides, as described elsewhere herein and, optionally, a cargo molecule, which can optionally be operably linked to a regulatory element. The one or more engineered targeting moiety, polypeptide, viral (e.g., AAV) delivery system polynucleotides, can be included on the same or different vectors as a cargo molecule capable of being delivered by the engineered targeting moiety, polypeptide, viral (e.g., AAV) delivery system described herein in embodiments containing a cargo molecule within the kit.

[0457] In some embodiments, the kit comprises a vector system and instructions for using the kit. In some embodiments, the vector system comprises (a) a first regulatory element operably linked to a direct repeat sequence and one or more insertion sites for inserting one or more guide sequences up- or downstream (whichever applicable) of the direct repeat sequence, wherein when expressed, the guide sequence directs sequence-specific binding of a Cas9 CRISPR complex to a target sequence in a eukaryotic cell, wherein the Cas9 CRISPR complex comprises a Cas9 enzyme complexed with the guide sequence that is hybridized to the target sequence; and/or (b) a second regulatory element operably linked to an enzyme-coding sequence encoding said Cas9 enzyme comprising a nuclear localization sequence. Where applicable, a tracr sequence may also be provided. In some embodiments, the kit comprises components (a) and (b) located on the same or different vectors of the system. In some embodiments, component (a) further comprises two or more guide sequences operably linked to the first regulatory element, wherein when expressed, each of the two or more guide sequences direct sequence specific binding of a CRISPR complex to a different target sequence in a eukaryotic cell. In some embodiments, the Cas9 enzyme comprises one or more nuclear localization sequences of sufficient strength to drive accumulation of said CRISPR enzyme in a detectable amount in the nucleus of a eukaryotic cell. In some embodiments, the CRISPR enzyme is a type V or VI CRISPR system enzyme. In some embodiments, the CRISPR enzyme is a Cas9 enzyme. In some embodiments, the Cas9 enzyme is derived from Francisella tularensis 1, Francisella tularensis subsp. novicida, Prevotella albensis, Lachnospiraceae bacterium MC2017 1, Butyrivibrio proteoclasticus, Peregrinibacteria bacterium GW2011_GWA2_33_10, Parcubacteria bacterium GW2011_GWC2_44_17, Smithella sp. SCADC, Acidaminococcus sp. BV3L6, Lachnospiraceae bacterium MA2020, Candidatus Methanoplasma termitum, Eubacterium eligens, Moraxella bovoculi 237, Leptospira inadai, Lachnospiraceae bacterium ND2006, Porphyromonas crevioricanis 3, Prevotella disiens, or Porphyromonas macacae Cas9 (e.g., modified to have or be associated with at least one DD), and may include further alteration or mutation of the Cas9, and can be a chimeric Cas9. In some embodiments, the DD-CRISPR enzyme is codon-optimized for expression in a eukaryotic cell. In some embodiments, the DD-CRISPR enzyme directs cleavage of one or two strands at the location of the target sequence. In some embodiments, the DD-CRISPR enzyme lacks or substantially DNA strand cleavage activity (e.g., no more than 5% nuclease activity as compared with a wild-type enzyme or enzyme not having the mutation or alteration that decreases nuclease activity). In some embodiments, the first regulatory element is a polymerase III promoter. In some embodiments, the second regulatory element is a polymerase II promoter. In some embodiments, the guide sequence is at least 16, 17, 18, 19, 20, 25 nucleotides, or between 16-30, or between 16-25, or between 16-20 nucleotides in length.

### Methods of Use

### General Discussion

[0458] The compositions containing the CNS-muscle or muscle specific targeting moieties described herein (e.g., the engineered targeting moiety system polynucleotides, polypeptides, vector(s), engineered cells, engineered viral (e.g., AAV) capsids, and viral and other particles) can be used generally to package and/or deliver one or more cargo polynucleotides to a recipient cell. In some embodiments, delivery, is done in a cell-specific manner based upon the specificity of the targeting moiety(ies) included. In some embodiments, the cell-specificity is conferred via the n-mer insert(s) included in the targeting moiety as previously discussed. In some embodiments, delivery is done in cell-specific manner based upon the tropism of the engineered viral (e.g., AAV) capsid. In some embodiments, engineered targeting moiety(ies), polypeptides, viral (e.g., AAV) capsids, particles, viral (e.g., AAV) particles, compositions thereof, and/or cells discussed herein can be administered to a subject or a cell, tissue, and/or organ and facilitate the transfer and/or integration of the cargo polynucleotide to the recipient cell. In other embodiments, engineered cells capable of producing engineered targeting moiety(ies), polypeptides, viral (e.g., AAV) capsids, particles, viral (e.g., AAV) particles and/or compositions thereof can be generated from engineered targeting moiety system molecules (e.g., polynucleotides, vectors, and vector systems, etc.). In some embodiments, the engineered targeting moiety(ies), polypeptides, viral (e.g., AAV) capsids, particles, viral (e.g., AAV) particles and/or compositions thereof can be delivered to a subject or a cell, tissue, and/or organ. When delivered to a subject, they engineered delivery system molecule(s) can transform a subject's cell in vivo or ex vivo to produce an engineered cell that can be capable of making an engineered targeting moiety(ies), polypeptides, viral (e.g., AAV) capsids, particles, viral (e.g., AAV) particles and/or compositions thereof, which can be released from the engineered cell and deliver cargo molecule(s) to a recipient cell in vivo or produce personalized engineered polypeptides, viral (e.g., AAV) particles, and/or other particles for reintroduction into the subject from which the recipient cell was obtained. In some embodiments, an engineered cell can be delivered to a subject, where it can release produced engineered targeting moieties, polypeptides, viral (e.g., AAV) particles, and/or other particles such that they can then deliver a cargo (e.g., cargo polynucleotide(s)) to a recipient cell. These general processes can be used in a variety of ways to treat and/or prevent disease or a symptom thereof in a subject, generate model cells, generate modified organisms, provide cell selection and screening assays, in bioproduction, and in other various applications.

[0459] In some embodiments, the engineered targeting moieties, polypeptides, viral (e.g., AAV) particles, and/or other particles, polynucleotides, vectors, and systems thereof can be used to generate engineered AAV capsid variant libraries that can be mined for variants with a desired cell-specificity, such as both CNS and muscle specificity or muscle cell (e.g., cardiac and/or skeletal muscle cell) specificity. The description provided herein as supported by the various Examples can demonstrate that one having a desired cell-specificity in mind could utilize the present invention as described herein to obtain a capsid with the desired cell-specificity, such as both CNS and muscle specificity or muscle cell (e.g., cardiac and/or skeletal muscle cell) specificity.

### Therapeutics

[0460] In some embodiments, one or more molecules of the engineered delivery system, engineered targeting moieties, polypeptides, viral (e.g., AAV) particles, and/or other particles, polynucleotides, vectors, systems thereof, engineered cells, and/or formulations thereof described herein can be delivered to a subject in need thereof as a therapy for one or more diseases. In some embodiments, the disease to be treated is a genetic or epigenetic based disease. In some embodiments, the disease to be treated is not a genetic or epigenetic based disease. In some embodiments, one or more molecules of the engineered delivery system, engineered targeting moieties, polypeptides, viral (e.g., AAV) particles, and/or other particles, polynucleotides, vectors, and systems thereof, engineered cells, and/or formulations thereof described herein can be delivered to a subject in need thereof as a treatment or prevention (or as a part of a treatment or prevention) of a disease. It will be appreciated that the specific disease to be treated and/or prevented by delivery of an engineered cell and/or engineered can be dependent on the cargo molecule packaged into an engineered AAV capsid particle.

[0461] Generally, the compositions described herein can be used in a therapy for treating a CNS and/or a muscle (such as a cardiac muscle or skeletal muscle) disease, disorder, or a symptom thereof. It will be appreciated that a CNS disease or disorder refers to any disease or disorder whose pathology involves or affects one or more cell types of the central nervous system. In some embodiments, the CNS disease or disorder is one whose primary pathology involves one or more cell types of the CNS. In some embodiments, one or more other cell types outside of the CNS are involved in the pathology of the CNS diseases, such as a muscle cell or peripheral nervous system cell. In some embodiments, the CNS disease or disorder can be caused by one or more genetic abnormalities. In some embodiments, the CNS disease or disorder is not caused by a genetic abnormality. Non-genetic cause of diseases includes infection, cancer, physical trauma and others that will be appreciated by those of skill in the art. It also will be appreciated that gene modification approaches to treating disease can be applied to treat and/or prevent both genetic diseases and non-genetic diseases. For example, in the case of non-genetic diseases, a gene therapy approach can be used to modify the cause of the non-genetic disease (e.g., a cancer or infectious organism) such that the cause is no longer disease causing (e.g., by eliminating or rendering non-functional the cancer cells or infectious organism).

[0462] Exemplary CNS diseases and disorders include, without limitation, Friedreich's Ataxia, Dravet Syndrome, Spinocerebellar Ataxia Type 3, Niemann Pick Type C, Huntington's Disease, Pompe Disease, Myotonic Dystrophy Type 1, Glut1 Deficiency Syndrome (De Vivo Syndrome), Tay-Sachs, Spinal Muscular Atrophy, Alzheimer's disease, Amyotrophic lateral sclerosis (ALS), Danon disease, Rett Syndrome, Angleman Syndrome, or a combination thereof. Others are described elsewhere herein and/or will be appreciated by those of ordinary skill in the art in view of the description provided herein).

[0463] Genetic diseases that can be treated are discussed in greater detail elsewhere herein (see e.g., discussion on Gene-modification based-therapies below). Other diseases can include, but are not limited to, any of the following: cancer (such as glioblastoma or other brain or CNS cancers), Acubetivacter infections, actinomycosis, African sleeping sickness, AIDS/HIV, ameobiasis, Anaplasmosis, Angiostrongyliasis, Anisakiasis, Anthrax, Acranobacterium haemolyticum infection, Argentine hemorrhagic fever, Ascariasis, Aspergillosis, Astrovirus infection, Babesiosis, Bacterial meningitis, Bacterial pneumonia, Bacterial vaginosis, Bacteroides infection, balantidiasis, Bartonellosis, Baylisascaris infection, BK virus infection, Black Piedra, Blastocytosis, Blastomycosis, Bolivian hemorrhagic fever, Botulism, Brazillian hemmorhagic fever, brucellosis, Bubonic plague, Burkholderia infection, buruli ulcer, calicivirus invention, campylobacteriosis, Candidasis, Capillariasis, Carrion's disease, Cat-scratch disease, cellulitis, Chagas Disease, Chancroid, Chickenpox, Chikungunya, Chlamydia, Chlamydia pneumoniae, Cholera, Chromoblastomycosis, Chytridiomycosis, Clonochiasis, Clostridium difficile colitis, Coccidioidomycosis, Colorado tick fever, rhinovirus/coronavirus invection (common cold), Cretzfeldt-Jakob disease, Crimean-congo hemorrhagic fever, Cryptococcosis, Cryptosporidosis, Cutaneous larva migrans (CLM), cyclosporiasis, cysticercosis, cytomegalovirus infection, Dengue fever, Desmodesmus infection, Dientamoebiasis, Diptheria, Diphylobothriasis, Dracunculiasis, Ebola, Echinococcosis, Ehrlichiosis, Enterobiasis, Enterococcus infection, Enterovirus infection, Epidemic typhus, Erthemia Infectisoum, Exanthem subitum, Fasciolasis, Fasciolopsiasis, fatal familial insomnia, filarisis, Clostridum perfingens infection, Fusobacterium infection, Gas gangrene (clostridial myonecrosis), Geotrichosis, Gerstmann-Straussler-Scheinker syndrome, Giardasis, Glanders, Gnathostomiasis, Gonorrhea, Granuloma inguinales, Group A streptococcal infection, Group B streptococcal infection, Haemophilus influenzae infection, Hand, foot, and mouth disease, hanta virus pulmonary syndrome, heartland virus disease, Helicobacter pylori infection, hemorrhagi fever with renal syndrome, Hendra virus infection, Hepatits (all groups A, B, C, D, E), hepes simplex, histoplasmosis, hookworm infection, human bocavirus infection, human ewingii erlichosis, Human granulocytic anaplasmosis, human metapneymovirus infection, human monocytic ehrlichosis, human papaloma virus, Hymenolepiasis, Epstein-Barr infection, mononucleosis, influenza, isoporisis, Kawasaki disease, Kingell kingae infection, Kuru, Lasas fever, Leginollosis (Legionnaires's disease and Potomac Fever), Leishmaniasis, Leprosy, Leptospirosis, Listeriosis, Lyme disease, lymphatic filariasis, lymphocytic choriomeningitis, Malaria, Marburg hemorrhagic feaver, measals, Middle East respiratory syndrome, Meliodosis, menigitis, Menigococcal disease, Metagonimiasis, Microsporidosis, Molluscum contagiosum, Monkeypox, Mumps, Murine typhus, Mycoplasma pneumonia, Mycoplasma genitalium infection, Mycetoma, Myiasis, Conjunctivitis, Nipah virus infection, Norovirus, Variant Creutzfeldt-Jakob disease, Nocardosis, Onchocerciasis, Opisthorchiasis, Paracoccidioidomycosis, Paragonimiasis, Pasteurellosis, Pdiculosisi capitis, Pediculosis corpis, Pediculosis pubis, pelvic inflammatory disease, pertussis, plague, pneumococcal infection, pneumocystis pneumonia, pneumonia, poliomyelitis, prevotella infection, primary amoebic menigoencephalitis, progressive multifocal leukoencephalopathy, Psittacosis, Qfever, rabies, relapsing fever, respiratory syncytial virus infection, rhinovirus infection, rickettsial infection, Rickettsialpox, Rift Valley Fever, Rocky Mountain Spotted Fever, Rotavirus infection, Rubella, Salmonellosis, SARS, Scabies, Scarlet fever, Schistosomiais, Sepsis, Shigellosis, Shingles, Smallpox, Sporotrichosisi, Staphlococcol infection (including MRSA), strongyloidiasis, subacute sclerosing panecephalitis, Syphillis, Taeniasis, tetanus, Trichophyton species infection, Tocariasis, Toxoplasmosis, Trachoma, Trichinosis, Trichuriasis, Tuberculosis, Tularemia, Typhoid Fever, Typhus Fever, Ureaplasma urealyticum infection, Valley fever, Venezuelan equine encephalitis, Venezuelan hemorrhagic fever, Vibrio species infection, Viral pneumonia, West Nile Fever, White Piedra, Yersinia pseudotuberculosis, Yersiniosis, Yellow fever, Zeaspora, Zika fever, Zygomycosis and combninations thereof.

[0464] Other diseases and disorders that can be treated using embodiments of the present invention include, but are not limited to, endocrine diseases (e.g., Type I and Type II diabetes, gestational diabetes, hypoglycemia. Glucagonoma, Goitre, Hyperthyroidism, hypothyroidism, thyroiditis, thyroid cancer, thyroid hormone resistance, parathyroid gland disorders, Osteoporosis, osteitis deformans, rickets, ostomalacia, hypopituitarism, pituitary tumors, etc.), skin conditions of infections and non-infectioua origin, eye diseases of infectious or non-infectious origin, gastrointestinal disorders of infectious or non-infectious origin, cardiovascular diseases of infectious or non-infectious origin, brain and neuron diseases of infectious or non-infectious origin, nervous system diseases of infectious or non-infectious origin, muscle diseases of infectious or non-infectious origin, bone diseases of infectious or non-infectious origin, reproductive system diseases of infectious or non-infectious origin, renal system diseases of infectious or non-infectious origin, blood diseases of infectious or non-infectious origin, lymphatic system diseases of infectious or non-infectious origin, immune system diseases of infectious or non-infectious origin, mental-illness of infectious or non-infectious origin and the like.

[0465] In some embodiments, the disease to be treated is a CNS or CNS related disease or disorder, such as a genetic CNS disease or disorder. Such CNS or CNS related disease (including genetic CNS disease or disorders are described in greater detail elsewhere herein.

[0466] Other diseases and disorders will be appreciated by those of skill in the art.

### Adoptive Cell Therapies

[0467] Generally speaking, adoptive cell transfer involves the transfer of cells (autologous, allogeneic, and/or xenogeneic) to a subject. The cells may or may not be modified and/or otherwise manipulated prior to delivery to the subject. Manipulation can include genetic modification by one or more gene modifying agents. Exemplary gene modifying agents and systems are described in greater detail elsewhere herein and will be appreciated by those of ordinary skill in the art. Such gene or other modification compositions or systems can be delivered to a cell to be modified for adoptive therapy by one or more of the compositions described herein containing a CNS-muscle or muscle specific targeting moiety.

[0468] In some embodiments, an engineered cell as described herein can be included in an adoptive cell transfer therapy. In some embodiments, an engineered cell as described herein can be delivered to a subject in need thereof. In some embodiments, the cell can be isolated from a subject, manipulated in vitro such that it is capable of generating an engineered AAV capsid particle described herein to produce an engineered cell and delivered back to the subject in an autologous manner or to a different subject in an allogeneic or xenogeneic manner. The cell isolated, manipulated, and/or delivered can be a eukaryotic cell. The cell isolated, manipulated, and/or delivered can be a stem cell. The cell isolated, manipulated, and/or delivered can be a differentiated cell. The cell isolated, manipulated, and/or delivered can be a nervous system cell, such as a central nervous system cell, including but not limited to a neuron, a glial cell, an astrocyte, a Schwann cell, a microglial cell, or other neuron support cell, and/or other brain or CNS cell, a muscle cell (e.g., a skeletal muscle cell and/or a cardiac muscle cell), or both a CNS and muscle cell. Other specific cell types will instantly be appreciated by one of ordinary skill in the art.

[0469] In some embodiments, the isolated cell can be manipulated such that it becomes an engineered cell as described elsewhere herein (e.g., contain and/or express one or more engineered delivery system molecules or vectors described elsewhere herein). Methods of making such engineered cells are described in greater detail elsewhere herein.

### Gene Drives

[0470] The present invention also contemplates use of the engineered delivery system molecules, vectors, engineered cells, and/or engineered AAV capsid particles described herein to generate a gene drive via delivery of one or more cargo polynucleotides or production of engineered AAV capsid particles with one or more cargo polynucleotides capable of producing a gene drive. In some embodiments, the gene drive can be a Cas-mediated RNA-guided gene drive e.g., Cas- to provide RNA-guided gene drives, for example in systems analogous to gene drives described in PCT Patent Publication WO 2015/105928. Systems of this kind may for example provide methods for altering eukaryotic germline cells, by introducing into the germline cell a nucleic acid sequence encoding an RNA-guided DNA nuclease and one or more guide RNAs. The guide RNAs may be designed to be complementary to one or more target locations on genomic DNA of the germline cell. The nucleic acid sequence encoding the RNA guided DNA nuclease and the nucleic acid sequence encoding the guide RNAs may be provided on constructs between flanking sequences, with promoters arranged such that the germline cell may express the RNA guided DNA nuclease and the guide RNAs, together with any desired cargo-encoding sequences that are also situated between the flanking sequences. The flanking sequences will typically include a sequence which is identical to a corresponding sequence on a selected target chromosome, so that the flanking sequences work with the components encoded by the construct to facilitate insertion of the foreign nucleic acid construct sequences into genomic DNA at a target cut site by mechanisms such as homologous recombination, to render the germline cell homozygous for the foreign nucleic acid sequence.

[0471] In this way, gene-drive systems are capable of introgressing desired cargo genes throughout a breeding population (Gantz et al., 2015, Highly efficient Cas9-mediated gene drive for population modification of the malaria vector mosquito Anopheles stephensi, PNAS 2015, published ahead of print Nov. 23, 2015, doi:10.1073/pnas.1521077112; Esvelt et al., 2014, Concerning RNA-guided gene drives for the alteration of wild populations eLife 2014; 3:e03401). In select embodiments, target sequences may be selected which have few potential off-target sites in a genome. Targeting multiple sites within a target locus, using multiple guide RNAs, may increase the cutting frequency and hinder the evolution of drive resistant alleles. Truncated guide RNAs may reduce off-target cutting. Paired nickases may be used instead of a single nuclease, to further increase specificity. Gene drive constructs (such as gene drive engineered delivery system constructrs) may include cargo sequences encoding transcriptional regulators, for example to activate homologous recombination genes and/or repress non-homologous end-joining. Target sites may be chosen within an essential gene, so that non-homologous end-joining events may cause lethality rather than creating a drive-resistant allele. The gene drive constructs can be engineered to function in a range of hosts at a range of temperatures (Cho et al. 2013, Rapid and Tunable Control of Protein Stability in Caenorhabditis elegans Using a Small Molecule, PLoS ONE 8(8): e72393. doi: 10.1371/journal.pone.0072393).

### Transplantation and Xenotransplantation

[0472] The engineered AAV capsid system molecules, vectors, engineered cells, and/or engineered delivery particles described herein, can be used to deliver cargo polynucleotides and/or otherwise be involved in modifying tissues for transplantation between two different persons (transplantation) or between species (xenotransplantation). Such techniques for generation of transgenic animals are described elsewhere herein. Interspecies transplantation techniques are generally known in the art. For example, RNA-guided DNA nucleases can be delivered using via engineered AAV capsid polynucleotides, vectors, engineered cells, and/or engineered AAV capsid particles described herein and can be used to knockout, knockdown or disrupt selected genes in an organ for transplant (e.g. ex vivo (e.g. after harvest but before transplantation) or in vivo (in donor or recipient)), animal, such as a transgenic pig (such as the human heme oxygenase-1 transgenic pig line), for example by disrupting expression of genes that encode epitopes recognized by the human immune system, i.e. xenoantigen genes. Candidate porcine genes for disruption may for example include α(1,3)-galactosyltransferase and cytidine monophosphate-N-acetylneuraminic acid hydroxylase genes (see PCT Patent Publication WO 2014/066505). In addition, genes encoding endogenous retroviruses may be disrupted, for example the genes encoding all porcine endogenous retroviruses (see Yang et al., 2015, Genome-wide inactivation of porcine endogenous retroviruses (PERVs), Science 27 Nov. 2015: Vol. 350 no. 6264 pp. 1101-1104). In addition, RNA-guided DNA nucleases may be used to target a site for integration of additional genes in xenotransplant donor animals, such as a human CD55 gene to improve protection against hyperacute rejection.

[0473] Where it is interspecies transplantation (such as human to human) the engineered AAV capsid system molecules, vectors, engineered cells, and/or engineered delivery particles described herein, can be used to deliver cargo polynucleotides and/or otherwise be involved to modify the tissue to be transplanted. In some embodiments, the modification can include modifying one or more HLA antigens or other tissue type determinants, such that the immunogenic profile is more similar or identical to the recipient's immunogenic profile than to the donor's so as to reduce the occurrence of rejection by the recipient. Relevant tissue type determinants are known in the art (such as those used to determine organ matching) and techniques to determine the immunogenic profile (which is made up of the expression signature of the tissue type determinants) are generally known in the art.

[0474] In some embodiments, the donor (such as before harvest) or recipient (after transplantation) can receive one or more of the engineered AAV capsid system molecules, vectors, engineered cells, and/or engineered delivery particles described herein that are capable of modifying the immunogenic profile of the transplanted cells, tissue, and/or organ. In some embodiments, the transplanted cells, tissue, and/or organ can be harvested from the donor and the engineered AAV capsid system molecules, vectors, engineered cells, and/or engineered delivery particles described herein capable of modifying the harvested cells, tissue, and/or organ to be, for example, less immunogenic or be modified to have some specific characteristic when transplanted in the recipient can be delivered to the harvested cells, tissue, and/or organ ex vivo. After delivery the cells, tissue, and/or organs can be transplanted into the donor.

Gene Modification and Treatment of Diseases with Genetic or Epigenetic Embodiments that Affect the CNS, Brain, and/or Neurons

[0475] The engineered delivery system molecules, vectors, engineered cells, and/or engineered delivery particles described herein (e.g., those with one or more targeting moieties, such as a CNS-specific targeting moiety described herein) can be used to modify genes or other polynucleotides and/or treat diseases of the CNS, brain, and/or neurons with genetic and/or epigenetic embodiments. As described elsewhere herein the cargo molecule can be a polynucleotide that can be delivered to a cell and, in some embodiments, be integrated into the genome of the cell. In some embodiments, the cargo molecule(s) can be one or more CRISPR-Cas system components. In some embodiments, the CRISPR-Cas components, when delivered by an engineered AAV capsid particles described herein can be optionally expressed in the recipient cell and act to modify the genome of the recipient cell in a sequence specific manner. In some embodiments, the cargo molecules that can be packaged and delivered by the engineered AAV capsid particles described herein can facilitate/mediate genome modification via a method that is not dependent on CRISPR-Cas. Such non-CRISPR-Cas genome modification systems will instantly be appreciated by those of ordinary skill in the art and are also, at least in part, described elsewhere herein. In some embodiments, modification is at a specific target sequence. In other embodiments, modification is at locations that appear to be random throughout the genome.

[0476] Examples of CNS, brain, and/or neuronal disease-associated genes and polynucleotides that can be modified using the engineered delivery AAV delivery system molecules, vectors, capsids, engineered cells, and/or engineered delivery particles described herein are described below.

[0477] In some embodiments, a therapeutic or preventive, such as the engineered AAV capsids and systems thereof as described elsewhere herein, can be delivered to a subject in need thereof or a cell thereof to treat a brain, neuron, neurological, and/or central nervous system disease or disorder (CNS). In some embodiments the brain, neuron, neurological, and/or CNS disease or disorder can be caused, directly or indirectly, by one or mutations in one or more of the following genes as compared to normal or non-pathological variant of the same: in the case of Amyotrophic lateral sclerosis (ALS): SOD1, ALS2, STEX, FUS, TARDBP, VEGF (VEGF-a, VEGF-b, VEGF-c); in the case of Alzheimer's disease: E1, CHIP, UCH, UBB, Tau, LRP, PICALM, Clusterin, PSi, SORL1, CR1, Vldlr, Ubal, Uba3, CHIP28, Aqp1, Uchl1, Uchl3, APP, AAA, CVAP, AD1, APOE, AD2, PSEN2, AD4, STM2, APBB2, FE65L1, NOS3, PLAU, URK, ACE, DCP1, ACE1, MPO, PACIPI, PAXIPIL, PTIP, A2M, BLMH, BMH, PSEN1, AD3); in the case of Autism: Mecp2, BZRAP1, MDGA2, Sema5A, Neurexin 1, GLO1, MECP2, RTT, PPMX, MRX16, MRX79, NLGN3, NLGN4, KIAA1260, AUTSX2; in the case of Fragile X Syndrome: FMR2, FXR1, FXR2, mGLUR5; in the case of Huntington's disease and disease like disorders: HD, IT15, PRNP, PRIP, JPH3, JP3, HDL2, TBP, SCA17); in the case of Parkinson's disease: NR4A2, NURR1, NOT, TINUR, SNCAIP, TBP, SCA17, SNCA, NACP, PARK1, PARK4, DJ1, PARK7, LRRK2, PARK8, PINK1, PARK6, UCHL1, PARK5, SNCA, NACP, PARK1, PARK4, PRKN, PARK2, PDJ, DBH, NDUFV2, PINK1, x-synuclein); in the case of Rett syndrome: MECP2, RTT, PPMX, MRX16, MRX79, CDKL5, STK9, MECP2, RTT, PPMX, MRX16, MRX79, x-Synuclein, DJ-1; in the case of Schizophrenia: Neuregulin1 (Nrg1), Erb4 (receptor for Neuregulin), Complexin1 (Cplxl), Tphl Tryptophan hydroxylase, Tph2, Tryptophan hydroxylase 2, Neurexin 1, GSK3, GSK3a, GSK3b, 5-HTT (Slc6a4), COMT, DRD (Drdla), SLC6A3, DAOA, DTNBP1, Dao (Dao 1)); in the case of Secretase Related Disorders (APH-1 (alpha and beta), Presenilin (Psen1), nicastrin, (Ncstn), PEN-2, Nos1, Parp1, Nat1, Nat2); in the case of Trinucleotide Repeat Disorders (HTT (Huntington's Dx), SBMA/SMAX1/AR (Kennedy's Dx), FXN/X25 (Friedrich's Ataxia), ATX3 (Machado-Joseph's Dx), ATXN1 and ATXN2 (spinocerebellar ataxias), DMPK (myotonic dystrophy), Atrophin-1 and Atn1 (DRPLA Dx), CBP (Creb-BP—global instability), VLDLR (Alzheimer's), Atxn7, Atxn10); in the case of diseases or disorders associated with or involving aberrant or abnormal axonal guidance signaling in the brain, neurons, and/or CNS: PRKCE; ITGAM; ROCK1; ITGA5; CXCR4; ADAM12; IGF1; RAC1; RAPlA; EIF4E; PRKCZ; NRP1; NTRK2; ARHGEF7; SMO; ROCK2; MAPK1; PGF; RAC2; PTPN11; GNAS; AKT2; PIK3CA; ERBB2; PRKCI; PTK2; CFL1; GNAQ; PIK3CB; CXCL12; PIK3C3; WNT11; PRKD1; GNB2L1; ABL1; MAPK3; ITGA1; KRAS; RHOA; PRKCD; PIK3C2A; ITGB7; GLI2; PXN; VASP; RAF1; FYN; ITGB1; MAP2K2; PAK4; ADAM17; AKT1; PIK3R1; GLI1; WNT5A; ADAM10; MAP2K1; PAK3; ITGB3; CDC42; VEGFA; ITGA2; EPHA8; CRKL; RND1; GSK3B; AKT3; PRKCA; in the case of diseases or disorders associated with or involving aberrant or abnormal actin cytoskeleton signaling in the brain, neurons, and/or CNS: ACTN4; PRKCE; ITGAM; ROCK1; ITGA5; IRAK1; PRKAA2; EIF2AK2; RAC1; INS; ARHGEF7; GRK6; ROCK2; MAPK1; RAC2; PLK1; AKT2; PIK3CA; CDK8; PTK2; CFL1; PIK3CB; MYH9; DIAPH1; PIK3C3; MAPK8; F2R; MAPK3; SLC9A1; ITGA1; KRAS; RHOA; PRKCD; PRKAA1; MAPK9; CDK2; PIM1; PIK3C2A; ITGB7; PPP1CC; PXN; VIL2; RAF1; GSN; DYRKIA; ITGB1; MAP2K2; PAK4; PIP5K1A; PIK3R1; MAP2K1; PAK3; ITGB3; CDC42; APC; ITGA2; TTK; CSNK1A1; CRKL; BRAF; VAV3; SGK; in the case of diseases or disorders associated with or involving Huntington's Disease signaling: PRKCE; IGF1; EP300; RCOR1; PRKCZ; HDAC4; TGM2; MAPK1; CAPNS1; AKT2; EGFR; NCOR2; SP1; CAPN2; PIK3CA; HDAC5; CREB1; PRKCI; HSPA5; REST; GNAQ; PIK3CB; PIK3C3; MAPK8; IGF1R; PRKD1; GNB2L1; BCL2L1; CAPN1; MAPK3; CASP8; HDAC2; HDAC7A; PRKCD; HDAC11; MAPK9; HDAC9; PIK3C2A; HDAC3; TP53; CASP9; CREBBP; AKT1; PIK3R1; PDPK1; CASP1; APAF1; FRAP1; CASP2; JUN; BAX; ATF4; AKT3; PRKCA; CLTC; SGK; HDAC6; CASP3; in the case of diseases or disorders associated with or involving aberrant, pathologic, and/or abnormal apoptosis regulation and/or signaling in the brain, neurons, and/or CNS and/or diseases or disorders thereof: PRKCE; ROCK1; BID; IRAK1; PRKAA2; EIF2AK2; BAK1; BIRC4; GRK6; MAPK1; CAPNS1; PLK1; AKT2; IKBKB; CAPN2; CDK8; FAS; NFKB2; BCL2; MAP3K14; MAPK8; BCL2L1; CAPN1; MAPK3; CASP8; KRAS; RELA; PRKCD; PRKAA1; MAPK9; CDK2; PIM1; TP53; TNF; RAF1; IKBKG; RELB; CASP9; DYRKIA; MAP2K2; CHUK; APAF1; MAP2K1; NFKB1; PAK3; LMNA; CASP2; BIRC2; TTK; CSNK1A1; BRAF; BAX; PRKCA; SGK; CASP3; BIRC3; PARP1; in the case of diseases or disorders associated with or involving aberrant, pathologic, and/or abnormal leukocyte extravasation signaling in the brain, neurons, and/or CNS and/or diseases or disorders thereof: ACTN4; CD44; PRKCE; ITGAM; ROCK1; CXCR4; CYBA; RAC1; RAPlA; PRKCZ; ROCK2; RAC2; PTPN11; MMP14; PIK3CA; PRKCI; PTK2; PIK3CB; CXCL12; PIK3C3; MAPK8; PRKD1; ABL1; MAPK10; CYBB; MAPK13; RHOA; PRKCD; MAPK9; SRC; PIK3C2A; BTK; MAPK14; NOX1; PXN; VIL2; VASP; ITGB1; MAP2K2; CTNND1; PIK3R1; CTNNB1; CLDN1; CDC42; F11R; ITK; CRKL; VAV3; CTTN; PRKCA; MMP1; MMP9; in the case of diseases or disorders associated with or involving aberrant, pathologic, and/or abnormal integrin signaling in the brain, neurons, and/or CNS and/or diseases or disorders thereof: ACTN4; ITGAM; ROCK1; ITGA5; RAC1; PTEN; RAPlA; TLN1; ARHGEF7; MAPK1; RAC2; CAPNS1; AKT2; CAPN2; PIK3CA; PTK2; PIK3CB; PIK3C3; MAPK8; CAV1; CAPN1; ABL1; MAPK3; ITGA1; KRAS; RHOA; SRC; PIK3C2A; ITGB7; PPP1CC; ILK; PXN; VASP; RAF1; FYN; ITGB1; MAP2K2; PAK4; AKT1; PIK3R1; TNK2; MAP2K1; PAK3; ITGB3; CDC42; RND3; ITGA2; CRKL; BRAF; GSK3B; AKT3; in the case of diseases or disorders associated with or involving aberrant, pathologic, and/or abnormal acute phase response signaling in the brain, neurons, and/or CNS and/or diseases or disorders thereof: IRAK1; SOD2; MYD88; TRAF6; ELK1; MAPK1; PTPN11; AKT2; IKBKB; PIK3CA; FOS; NFKB2; MAP3K14; PIK3CB; MAPK8; RIPK1; MAPK3; IL6ST; KRAS; MAPK13; IL6R; RELA; SOCS1; MAPK9; FTL; NR3C1; TRAF2; SERPINE1; MAPK14; TNF; RAF1; PDK1; IKBKG; RELB; MAP3K7; MAP2K2; AKT1; JAK2; PIK3R1; CHUK; STAT3; MAP2K1; NFKB1; FRAP1; CEBPB; JUN; AKT3; IL1R1; IL6; in the case of diseases or disorders associated with or involving aberrant, pathologic, and/or abnormal PTEN signaling in the brain, neurons, and/or CNS and/or diseases or disorders thereof: ITGAM; ITGA5; RAC1; PTEN; PRKCZ; BCL2L11; MAPK1; RAC2; AKT2; EGFR; IKBKB; CBL; PIK3CA; CDKN1B; PTK2; NFKB2; BCL2; PIK3CB; BCL2L1; MAPK3; ITGA1; KRAS; ITGB7; ILK; PDGFRB; INSR; RAF1; IKBKG; CASP9; CDKN1A; ITGB1; MAP2K2; AKT1; PIK3R1; CHUK; PDGFRA; PDPK1; MAP2K1; NFKB1; ITGB3; CDC42; CCND1; GSK3A; ITGA2; GSK3B; AKT3; FOXOl; CASP3; RPS6KB1; in the case of diseases or disorders associated with or involving aberrant, pathologic, and/or abnormal p53 signaling in the brain, neurons, and/or CNS and/or diseases or disorders thereof: PTEN; EP300; BBC3; PCAF; FASN; BRCA1; GADD45A; BIRC5; AKT2; PIK3CA; CHEK1; TP53INP1; BCL2; PIK3CB; PIK3C3; MAPK8; THBS1; ATR; BCL2L1; E2F1; PMAIP1; CHEK2; TNFRSF1OB; TP73; RBl; HDAC9; CDK2; PIK3C2A; MAPK14; TP53; LRDD; CDKN1A; HIPK2; AKT1; PIK3R1; RRM2B; APAF1; CTNNB1; SIRT1; CCND1; PRKDC; ATM; SFN; CDKN2A; JUN; SNAI2; GSK3B; BAX; AKT3; in the case of diseases or disorders associated with or involving aberrant, pathologic, and/or abnormal aryl hydrocarbon receptor signaling in the brain, neurons, and/or CNS and/or diseases or disorders thereof: HSPB1; EP300; FASN; TGM2; RXRA; MAPK1; NQO1; NCOR2; SP1; ARNT; CDKN1B; FOS; CHEK1; SMARCA4; NFKB2; MAPK8; ALDH1A1; ATR; E2F1; MAPK3; NRIP1; CHEK2; RELA; TP73; GSTP1; RB1; SRC; CDK2; AHR; NFE2L2; NCOA3; TP53; TNF; CDKN1A; NCOA2; APAF1; NFKB1; CCND1; ATM; ESR1; CDKN2A; MYC; JUN; ESR2; BAX; IL6; CYP1B1; HSP90AA1; in the case of diseases or disorders associated with or involving aberrant, pathologic, and/or abnormal xenobiotic metabolism signaling in the brain, neurons, and/or CNS and/or diseases or disorders thereof: PRKCE; EP300; PRKCZ; RXRA; MAPK1; NQO1; NCOR2; PIK3CA; ARNT; PRKCI; NFKB2; CAMK2A; PIK3CB; PPP2R1A; PIK3C3; MAPK8; PRKD1; ALDH1A1; MAPK3; NRIP1; KRAS; MAPK13; PRKCD; GSTP1; MAPK9; NOS2A; ABCB1; AHR; PPP2CA; FTL; NFE2L2; PIK3C2A; PPARGC1A; MAPK14; TNF; RAF1; CREBBP; MAP2K2; PIK3R1; PPP2R5C; MAP2K1; NFKB1; KEAP1; PRKCA; EIF2AK3; IL6; CYP1B1; HSP90AA1; in the case of diseases or disorders associated with or involving aberrant, pathologic, and/or abnormal SAPK/JNK signaling in the brain, neurons, and/or CNS and/or diseases or disorders thereof: PRKCE; IRAK1; PRKAA2; EIF2AK2; RAC1; ELK1; GRK6; MAPK1; GADD45A; RAC2; PLK1; AKT2; PIK3CA; FADD; CDK8; PIK3CB; PIK3C3; MAPK8; RIPK1; GNB2L1; IRS1; MAPK3; MAPK10; DAXX; KRAS; PRKCD; PRKAA1; MAPK9; CDK2; PIM1; PIK3C2A; TRAF2; TP53; LCK; MAP3K7; DYRKIA; MAP2K2; PIK3R1; MAP2K1; PAK3; CDC42; JUN; TTK; CSNK1A1; CRKL; BRAF; SGK; in the case of diseases or disorders associated with or involving aberrant, pathologic, and/or abnormal PPAr/RXR signaling in the brain, neurons, and/or CNS and/or diseases or disorders thereof: PRKAA2; EP300; INS; SMAD2; TRAF6; PPARA; FASN; RXRA; MAPK1; SMAD3; GNAS; IKBKB; NCOR2; ABCA1; GNAQ; NFKB2; MAP3K14; STAT5B; MAPK8; IRS1; MAPK3; KRAS; RELA; PRKAA1; PPARGC1A; NCOA3; MAPK14; INSR; RAF1; IKBKG; RELB; MAP3K7; CREBBP; MAP2K2; JAK2; CHUK; MAP2K1; NFKB1; TGFBR1; SMAD4; JUN; IL1R1; PRKCA; IL6; HSP90AA1; ADIPOQ; in the case of diseases or disorders associated with or involving aberrant, pathologic, and/or abnormal NF-kappaB signaling in the brain, neurons, and/or CNS and/or diseases or disorders thereof: IRAK1; EIF2AK2; EP300; INS; MYD88; PRKCZ; TRAF6; TBK1; AKT2; EGFR; IKBKB; PIK3CA; BTRC; NFKB2; MAP3K14; PIK3CB; PIK3C3; MAPK8; RIPK1; HDAC2; KRAS; RELA; PIK3C2A; TRAF2; TLR4; PDGFRB; TNF; INSR; LCK; IKBKG; RELB; MAP3K7; CREBBP; AKT1; PIK3R1; CHUK; PDGFRA; NFKB1; TLR2; BCL10; GSK3B; AKT3; TNFAIP3; IL1R1; in the case of diseases or disorders associated with or involving aberrant, pathologic, and/or abnormal neuregulin signaling in the brain, neurons, and/or CNS and/or diseases or disorders thereof: ERBB4; PRKCE; ITGAM; ITGA5; PTEN; PRKCZ; ELK1; MAPK1; PTPN11; AKT2; EGFR; ERBB2; PRKCI; CDKN1B; STAT5B; PRKD1; MAPK3; ITGA1; KRAS; PRKCD; STAT5A; SRC; ITGB7; RAF1; ITGB1; MAP2K2; ADAM17; AKT1; PIK3R1; PDPK1; MAP2K1; ITGB3; EREG; FRAP1; PSEN1; ITGA2; MYC; NRG1; CRKL; AKT3; PRKCA; HSP90AA1; RPS6KB1; in the case of diseases or disorders associated with or involving aberrant, pathologic, and/or abnormal wnt and beta catenin signaling in the brain, neurons, and/or CNS and/or diseases or disorders thereof: CD44; EP300; LRP6; DVL3; CSNK1E; GJA1; SMO; AKT2; PIN1; CDH1; BTRC; GNAQ; MARK2; PPP2R1A; WNT11; SRC; DKK1; PPP2CA; SOX6; SFRP2; ILK; LEF1; SOX9; TP53; MAP3K7; CREBBP; TCF7L2; AKT1; PPP2R5C; WNT5A; LRP5; CTNNB1; TGFBR1; CCND1; GSK3A; DVL1; APC; CDKN2A; MYC; CSNK1A1; GSK3B; AKT3; SOX2; in the case of diseases or disorders associated with or involving aberrant, pathologic, and/or abnormal insulin receptor signaling in the brain, neurons, and/or CNS and/or diseases or disorders thereof: PTEN; INS; EIF4E; PTPN1; PRKCZ; MAPK1; TSC1; PTPN11; AKT2; CBL; PIK3CA; PRKCI; PIK3CB; PIK3C3; MAPK8; IRS1; MAPK3; TSC2; KRAS; EIF4EBP1; SLC2A4; PIK3C2A; PPP1CC; INSR; RAF1; FYN; MAP2K2; JAK1; AKT1; JAK2; PIK3R1; PDPK1; MAP2K1; GSK3A; FRAP1; CRKL; GSK3B; AKT3; FOXOl; SGK; RPS6KB1; in the case of diseases or disorders associated with or involving aberrant, pathologic, and/or abnormal IL-6 signaling in the brain, neurons, and/or CNS and/or diseases or disorders thereof: HSPB1; TRAF6; MAPKAPK2; ELK1; MAPK1; PTPN11; IKBKB; FOS; NFKB2; MAP3K14; MAPK8; MAPK3; MAPK10; IL6ST; KRAS; MAPK13; IL6R; RELA; SOCS1; MAPK9; ABCB1; TRAF2; MAPK14; TNF; RAF1; IKBKG; RELB; MAP3K7; MAP2K2; IL8; JAK2; CHUK; STAT3; MAP2K1; NFKB1; CEBPB; JUN; ILIR1; SRF; IL6; in the case of diseases or disorders associated with or involving aberrant, pathologic, and/or abnormal IGF-1 signaling in the brain, neurons, and/or CNS and/or diseases or disorders thereof: IGF1; PRKCZ; ELK1; MAPK1; PTPN11; NEDD4; AKT2; PIK3CA; PRKCI; PTK2; FOS; PIK3CB; PIK3C3; MAPK8; IGF1R; IRS1; MAPK3; IGFBP7; KRAS; PIK3C2A; YWHAZ; PXN; RAF1; CASP9; MAP2K2; AKT1; PIK3R1; PDPK1; MAP2K1; IGFBP2; SFN; JUN; CYR61; AKT3; FOXOl; SRF; CTGF; RPS6KB1; in the case of diseases or disorders associated with or involving aberrant, pathologic, and/or abnormal NRF2-mediated oxidative stress response pathway regulation or signaling in the brain, neurons, and/or CNS and/or diseases or disorders thereof: PRKCE; EP300; SOD2; PRKCZ; MAPK1; SQSTM1; NQO1; PIK3CA; PRKCI; FOS; PIK3CB; PIK3C3; MAPK8; PRKD1; MAPK3; KRAS; PRKCD; GSTP1; MAPK9; FTL; NFE2L2; PIK3C2A; MAPK14; RAF1; MAP3K7; CREBBP; MAP2K2; AKT1; PIK3R1; MAP2K1; PPIB; JUN; KEAP1; GSK3B; ATF4; PRKCA; EIF2AK3; HSP90AA1; PRDX1; in the case of diseases or disorders associated with or involving aberrant, pathologic, and/or abnormal PPAR (e.g. PPAR alpha, PPAR beta, PPAR delta, and/or PPAR gamma) regulation or signaling in the brain, neurons, and/or CNS and/or diseases or disorders thereof: EP300; INS; TRAF6; PPARA; RXRA; MAPK1; IKBKB; NCOR2; FOS; NFKB2; MAP3K14; STAT5B; MAPK3; NRIP1; KRAS; PPARG; RELA; STAT5A; TRAF2; PPARGC1A; PDGFRB; TNF; INSR; RAF1; IKBKG; RELB; MAP3K7; CREBBP; MAP2K2; CHUK; PDGFRA; MAP2K1; NFKB1; JUN; ILIR1; HSP90AA1; in the case of diseases or disorders associated with or involving aberrant, pathologic, and/or abnormal Fc Epsilon RI regulation or signaling in the brain, neurons, and/or CNS and/or diseases or disorders thereof: PRKCE; RAC1; PRKCZ; LYN; MAPK1; RAC2; PTPN11; AKT2; PIK3CA; SYK; PRKCI; PIK3CB; PIK3C3; MAPK8; PRKD1; MAPK3; MAPK10; KRAS; MAPK13; PRKCD; MAPK9; PIK3C2A; BTK; MAPK14; TNF; RAF1; FYN; MAP2K2; AKT1; PIK3R1; PDPK1; MAP2K1; AKT3; VAV3; PRKCA; in the case of diseases or disorders associated with or involving aberrant, pathologic, and/or abnormal G-protein coupled receptor regulation or signaling in the brain, neurons, and/or CNS and/or diseases or disorders thereof: PRKCE; RAPlA; RGS16; MAPK1; GNAS; AKT2; IKBKB; PIK3CA; CREB1; GNAQ; NFKB2; CAMK2A; PIK3CB; PIK3C3; MAPK3; KRAS; RELA; SRC; PIK3C2A; RAF1; IKBKG; RELB; FYN; MAP2K2; AKT1; PIK3R1; CHUK; PDPK1; STAT3; MAP2K1; NFKB1; BRAF; ATF4; AKT3; PRKCA; in the case of diseases or disorders associated with or involving aberrant, pathologic, and/or abnormal inositol phosphate metabolism regulation or signaling in the brain, neurons, and/or CNS and/or diseases or disorders thereof: PRKCE; IRAK1; PRKAA2; EIF2AK2; PTEN; GRK6; MAPK1; PLK1; AKT2; PIK3CA; CDK8; PIK3CB; PIK3C3; MAPK8; MAPK3; PRKCD; PRKAA1; MAPK9; CDK2; PIM1; PIK3C2A; DYRKIA; MAP2K2; PIP5K1A; PIK3R1; MAP2K1; PAK3; ATM; TTK; CSNK1A1; BRAF; SGK; in the case of diseases or disorders associated with or involving aberrant, pathologic, and/or abnormal PDGF regulation or signaling in the brain, neurons, and/or CNS and/or diseases or disorders thereof: EIF2AK2; ELK1; ABL2; MAPK1; PIK3CA; FOS; PIK3CB; PIK3C3; MAPK8; CAV1; ABL1; MAPK3; KRAS; SRC; PIK3C2A; PDGFRB; RAF1; MAP2K2; JAK1; JAK2; PIK3R1; PDGFRA; STAT3; SPHK1; MAP2K1; MYC; JUN; CRKL; PRKCA; SRF; STAT1; SPHK2; in the case of diseases or disorders associated with involving aberrant, pathologic, and/or abnormal VEGF regulation or signaling in the brain, neurons, and/or CNS and/or diseases or disorders thereof: ACTN4; ROCK1; KDR; FLT1; ROCK2; MAPK1; PGF; AKT2; PIK3CA; ARNT; PTK2; BCL2; PIK3CB; PIK3C3; BCL2L1; MAPK3; KRAS; HIF1A; NOS3; PIK3C2A; PXN; RAF1; MAP2K2; ELAVL1; AKT1; PIK3R1; MAP2K1; SFN; VEGFA; AKT3; FOXOl; PRKCA; in the case of diseases or disorders associated with or involving aberrant, pathologic, and/or abnormal natural killer cell regulation or signaling in the brain, neurons, and/or CNS and/or diseases or disorders thereof: PRKCE; RAC1; PRKCZ; MAPK1; RAC2; PTPN11; KIR2DL3; AKT2; PIK3CA; SYK; PRKCI; PIK3CB; PIK3C3; PRKD1; MAPK3; KRAS; PRKCD; PTPN6; PIK3C2A; LCK; RAF1; FYN; MAP2K2; PAK4; AKT1; PIK3R1; MAP2K1; PAK3; AKT3; VAV3; PRKCA; in the case of diseases or disorders associated with or involving aberrant, pathologic, and/or abnormal cell cycle G1/S checkpoint regulation or signaling in the brain, neurons, and/or CNS and/or diseases or disorders thereof: HDAC4; SMAD3; SUV39H1; HDAC5; CDKN1B; BTRC; ATR; ABL1; E2F1; HDAC2; HDAC7A; RBl; HDAC11; HDAC9; CDK2; E2F2; HDAC3; TP53; CDKN1A; CCND1; E2F4; ATM; RBL2; SMAD4; CDKN2A; MYC; NRG1; GSK3B; RBL1; HDAC6; in the case of diseases or disorders associated with or involving aberrant, pathologic, and/or abnormal T-cell receptor regulation or signaling in the brain, neurons, and/or CNS and/or diseases or disorders thereof: RAC1; ELK1; MAPK1; IKBKB; CBL; PIK3CA; FOS; NFKB2; PIK3CB; PIK3C3; MAPK8; MAPK3; KRAS; RELA; PIK3C2A; BTK; LCK; RAF1; IKBKG; RELB; FYN; MAP2K2; PIK3R1; CHUK; MAP2K1; NFKB1; ITK; BCL10; JUN; VAV3; in the case of diseases or disorders associated with or involving aberrant, pathologic, and/or abnormal death receptor regulation or signaling in the brain, neurons, and/or CNS and/or diseases or disorders thereof: CRADD; HSPB1; BID; BIRC4; TBK1; IKBKB; FADD; FAS; NFKB2; BCL2; MAP3K14; MAPK8; RIPK1; CASP8; DAXX; TNFRSF10B; RELA; TRAF2; TNF; IKBKG; RELB; CASP9; CHUK; APAF1; NFKB1; CASP2; BIRC2; CASP3; BIRC3; in the case of diseases or disorders associated with or involving aberrant, pathologic, and/or FGF regulation or signaling in the brain, neurons, and/or CNS and/or diseases or disorders thereof: RAC1; FGFR1; MET; MAPKAPK2; MAPK1; PTPN11; AKT2; PIK3CA; CREB1; PIK3CB; PIK3C3; MAPK8; MAPK3; MAPK13; PTPN6; PIK3C2A; MAPK14; RAF1; AKT1; PIK3R1; STAT3; MAP2K1; FGFR4; CRKL; ATF4; AKT3; PRKCA; HGF; in the case of diseases or disorders associated with or involving aberrant, pathologic, and/or GM-CSF regulation or signaling in the brain, neurons, and/or CNS and/or diseases or disorders thereof: LYN; ELK1; MAPK1; PTPN11; AKT2; PIK3CA; CAMK2A; STAT5B; PIK3CB; PIK3C3; GNB2L1; BCL2L1; MAPK3; ETS1; KRAS; RUNX1; PIM1; PIK3C2A; RAF1; MAP2K2; AKT1; JAK2; PIK3R1; STAT3; MAP2K1; CCND1; AKT3; STAT1; in the case of diseases or disorders associated with or involving aberrant, pathologic, and/or amyotrophic lateral sclerosis regulation or signaling in the brain, neurons, and/or CNS and/or diseases or disorders thereof: BID; IGF1; RAC1; BIRC4; PGF; CAPNS1; CAPN2; PIK3CA; BCL2; PIK3CB; PIK3C3; BCL2L1; CAPN1; PIK3C2A; TP53; CASP9; PIK3R1; RAB5A; CASP1; APAF1; VEGFA; BIRC2; BAX; AKT3; CASP3; BIRC3; in the case of diseases or disorders associated with or involving aberrant, pathologic, and/or JAK/Stat regulation or signaling in the brain, neurons, and/or CNS and/or diseases or disorders thereof: PTPN1; MAPK1; PTPN11; AKT2; PIK3CA; STAT5B; PIK3CB; PIK3C3; MAPK3; KRAS; SOCS1; STAT5A; PTPN6; PIK3C2A; RAF1; CDKN1A; MAP2K2; JAK1; AKT1; JAK2; PIK3R1; STAT3; MAP2K1; FRAP1; AKT3; STAT1; in the case of diseases or disorders associated with or involving aberrant, pathologic, and/or nicotinate and nicotinamide metabolism regulation or signaling in the brain, neurons, and/or CNS and/or diseases or disorders thereof: PRKCE; IRAK1; PRKAA2; EIF2AK2; GRK6; MAPK1; PLK1; AKT2; CDK8; MAPK8; MAPK3; PRKCD; PRKAA1; PBEF1; MAPK9; CDK2; PIM1; DYRKIA; MAP2K2; MAP2K1; PAK3; NT5E; TTK; CSNK1A1; BRAF; SGK; in the case of diseases or disorders associated with or involving aberrant, pathologic, and/or chemokine signaling regulation or signaling in the brain, neurons, and/or CNS and/or diseases or disorders thereof: CXCR4; ROCK2; MAPK1; PTK2; FOS; CFL1; GNAQ; CAMK2A; CXCL12; MAPK8; MAPK3; KRAS; MAPK13; RHOA; CCR3; SRC; PPP1CC; MAPK14; NOX1; RAF1; MAP2K2; MAP2K1; JUN; CCL2; PRKCA; in the case of diseases or disorders associated with or involving aberrant, pathologic, and/or IL-2 signaling regulation or signaling in the brain, neurons, and/or CNS and/or diseases or disorders thereof: ELK1; MAPK1; PTPN11; AKT2; PIK3CA; SYK; FOS; STAT5B; PIK3CB; PIK3C3; MAPK8; MAPK3; KRAS; SOCS1; STAT5A; PIK3C2A; LCK; RAFI; MAP2K2; JAK1; AKT1; PIK3R1; MAP2K1; JUN; AKT3; in the case of diseases or disorders associated with or involving synaptic long term depression in the brain, neurons, and/or CNS and/or diseases or disorders thereof: PRKCE; IGF1; PRKCZ; PRDX6; LYN; MAPK1; GNAS; PRKCI; GNAQ; PPP2R1A; IGF1R; PRKD1; MAPK3; KRAS; GRN; PRKCD; NOS3; NOS2A; PPP2CA; YWHAZ; RAF1; MAP2K2; PPP2R5C; MAP2K1; PRKCA; in the case of diseases or disorders associated with or involving aberrant, pathologic, and/or estrogen receptor regulation or signaling in the brain, neurons, and/or CNS and/or diseases or disorders thereof: TAF4B; EP300; CARM1; PCAF; MAPK1; NCOR2; SMARCA4; MAPK3; NRIP1; KRAS; SRC; NR3C1; HDAC3; PPARGC1A; RBM9; NCOA3; RAF1; CREBBP; MAP2K2; NCOA2; MAP2K1; PRKDC; ESR1; ESR2; in the case of diseases or disorders associated with or involving aberrant, pathologic, and/or protein ubiquitination pathway activity, regulation, and/or signaling in the brain, neurons, and/or CNS and/or diseases or disorders thereof: TRAF6; SMURF1; BIRC4; BRCA1; UCHL1; NEDD4; CBL; UBE2I; BTRC; HSPA5; USP7; USP10; FBXW7; USP9X; STUB1; USP22; B2M; BIRC2; PARK2; USP8; USP1; VHL; HSP90AA1; BIRC3; in the case of diseases or disorders associated with or involving aberrant, pathologic, and/or IL-10 regulation or signaling in the brain, neurons, and/or CNS and/or diseases or disorders thereof: TRAF6; CCR1; ELK1; IKBKB; SP1; FOS; NFKB2; MAP3K14; MAPK8; MAPK13; RELA; MAPK14; TNF; IKBKG; RELB; MAP3K7; JAK1; CHUK; STAT3; NFKB1; JUN; IL1R1; IL6; in the case of diseases or disorders associated with or involving aberrant, pathologic, and/or Vitamin D receptor (VDR) and/or RXR regulation or signaling in the brain, neurons, and/or CNS and/or diseases or disorders thereof: PRKCE; EP300; PRKCZ; RXRA; GADD45A; HES1; NCOR2; SP1; PRKCI; CDKN1B; PRKD1; PRKCD; RUNX2; KLF4; YY1; NCOA3; CDKN1A; NCOA2; SPP1; LRP5; CEBPB; FOXOl; PRKCA; in the case of diseases or disorders associated with or involving aberrant, pathologic, and/or TGF-beta regulation or signaling in the brain, neurons, and/or CNS and/or diseases or disorders thereof: EP300; SMAD2; SMURF1; MAPK1; SMAD3; SMAD1; FOS; MAPK8; MAPK3; KRAS; MAPK9; RUNX2; SERPINE1; RAF1; MAP3K7; CREBBP; MAP2K2; MAP2K1; TGFBR1; SMAD4; JUN; SMAD5; in the case of diseases or disorders associated with or involving aberrant, pathologic, and/or Toll-like Receptor activity, regulation, and/or signaling in the brain, neurons, and/or CNS and/or diseases or disorders thereof: IRAK1; EIF2AK2; MYD88; TRAF6; PPARA; ELK1; IKBKB; FOS; NFKB2; MAP3K14; MAPK8; MAPK13; RELA; TLR4; MAPK14; IKBKG; RELB; MAP3K7; CHUK; NFKB1; TLR2; JUN; in the case of diseases or disorders associated with or involving aberrant, pathologic, and/or p38 MAPK activity, regulation, and/or signaling in the brain, neurons, and/or CNS and/or diseases or disorders thereof: HSPB1; IRAK1; TRAF6; MAPKAPK2; ELK1; FADD; FAS; CREB1; DDIT3; RPS6KA4; DAXX; MAPK13; TRAF2; MAPK14; TNF; MAP3K7; TGFBR1; MYC; ATF4; IL1R1; SRF; STAT1; in the case of diseases or disorders associated with or involving aberrant, pathologic, and/or neurotrophin/TRK activity, regulation, and/or signaling in the brain, neurons, and/or CNS and/or diseases or disorders thereof: NTRK2; MAPK1; PTPN11; PIK3CA; CREB1; FOS; PIK3CB; PIK3C3; MAPK8; MAPK3; KRAS; PIK3C2A; RAF1; MAP2K2; AKT1; PIK3R1; PDPK1; MAP2K1; CDC42; JUN; ATF4; in the case of diseases or disorders associated with or involving aberrant, pathologic, and/or FXR and/or RXR activity, regulation, and/or signaling in the brain, neurons, and/or CNS and/or diseases or disorders thereof: INS; PPARA; FASN; RXRA; AKT2; SDC1; MAPK8; APOB; MAPK10; PPARG; MTTP; MAPK9; PPARGC1A; TNF; CREBBP; AKT1; SREBF1; FGFR4; AKT3; FOXOl; in the case of diseases or disorders associated with or involving aberrant, pathologic, and/or synaptic long term potentiation in the brain, neurons, and/or CNS and/or diseases or disorders thereof: PRKCE; RAPlA; EP300; PRKCZ; MAPK1; CREB1; PRKCI; GNAQ; CAMK2A; PRKD1; MAPK3; KRAS; PRKCD; PPP1CC; RAF1; CREBBP; MAP2K2; MAP2K1; ATF4; PRKCA; in the case of diseases or disorders associated with or involving aberrant, pathologic, and/or calcium regulation and/or signaling in the brain, neurons, and/or CNS and/or diseases or disorders thereof: RAPlA; EP300; HDAC4; MAPK1; HDAC5; CREB1; CAMK2A; MYH9; MAPK3; HDAC2; HDAC7A; HDAC11; HDAC9; HDAC3; CREBBP; CALR; CAMKK2; ATF4; HDAC6; in the case of diseases or disorders associated with or involving aberrant, pathologic, and/or EGF or EGFR regulation and/or signaling in the brain, neurons, and/or CNS and/or diseases or disorders thereof: ELK1; MAPK1; EGFR; PIK3CA; FOS; PIK3CB; PIK3C3; MAPK8; MAPK3; PIK3C2A; RAF1; JAK1; PIK3R1; STAT3; MAP2K1; JUN; PRKCA; SRF; STAT1; in the case of diseases or disorders associated with or involving aberrant, pathologic, and/or LPS/IL-1 mediated inhibition of RXR function, regulation and/or signaling in the brain, neurons, and/or CNS and/or diseases or disorders thereof: IRAK1; MYD88; TRAF6; PPARA; RXRA; ABCA1; MAPK8; ALDH1A1; GSTP1; MAPK9; ABCB1; TRAF2; TLR4; TNF; MAP3K7; NR1H2; SREBF1; JUN; IL1R1; in the case of diseases or disorders associated with or involving aberrant, pathologic, and/or LXR/RXR function, regulation and/or signaling in the brain, neurons, and/or CNS and/or diseases or disorders thereof: FASN; RXRA; NCOR2; ABCA1; NFKB2; IRF3; RELA; NOS2A; TLR4; TNF; RELB; LDLR; NR1H2; NFKB1; SREBF1; IL1R1; CCL2; IL6; MMP9; in the case of diseases or disorders associated with or involving aberrant, pathologic, and/or amyloid processing in the brain, neurons, and/or CNS and/or diseases or disorders thereof: PRKCE; CSNK1E; MAPK1; CAPNS1; AKT2; CAPN2; CAPN1; MAPK3; MAPK13; MAPT; MAPK14; AKT1; PSEN1; CSNK1A1; GSK3B; AKT3; APP; in the case of diseases or disorders associated with or involving aberrant, pathologic, and/or abnormal IL-4 activity, signaling, and/or regulation in the brain, neurons, and/or CNS and/or diseases or disorders thereof: AKT2; PIK3CA; PIK3CB; PIK3C3; IRS1; KRAS; SOCS1; PTPN6; NR3C1; PIK3C2A; JAK1; AKT1; JAK2; PIK3R1; FRAP1; AKT3; RPS6KB1; in the case of diseases or disorders associated with or involving aberrant, pathologic, and/or abnormal cell cycle: G2/M DNA damage checkpoint regulation activity, signaling, and/or regulation in the brain, neurons, and/or CNS and/or diseases or disorders thereof: EP300; PCAF; BRCA1; GADD45A; PLK1; BTRC; CHEK1; ATR; CHEK2; YWHAZ; TP53; CDKN1A; PRKDC; ATM; SFN; CDKN2A; in the case of diseases or disorders associated with or involving aberrant, pathologic, and/or abnormal purine metabolism signaling thereof, and/or regulation thereof in the brain, neurons, and/or CNS and/or diseases or disorders thereof: NME2; SMARCA4; MYH9; RRM2; ADAR; EIF2AK4; PKM2; ENTPD1; RAD51; RRM2B; TJP2; RAD51C; NT5E; POLD1; NME1; in the case of diseases or disorders associated with or involving aberrant, pathologic, and/or abnormal cAMP-mediated signaling and/or regulation in the brain, neurons, and/or CNS and/or diseases or disorders thereof: RAPlA; MAPK1; GNAS; CREB1; CAMK2A; MAPK3; SRC; RAF1; MAP2K2; STAT3; MAP2K1; BRAF; ATF4; in the case of diseases or disorders associated with or involving aberrant, pathologic, and/or abnormal mitochondrial function in the brain, neurons, and/or CNS and/or diseases or disorders thereof: SOD2; MAPK8; CASP8; MAPK10; MAPK9; CASP9; PARK7; PSEN1; PARK2; APP; CASP3; AIF; CytC; SMAC (Diablo); Aifm-1; Aifm-2; in the case of diseases or disorders associated with or involving aberrant, pathologic, and/or abnormal notch signaling and/or regulation in the brain, neurons, and/or CNS and/or diseases or disorders thereof: HES1; JAG1; NUMB; NOTCH4; ADAM17; NOTCH2; PSEN1; NOTCH3; NOTCH1; DLL4; in the case of diseases or disorders associated with or involving aberrant, pathologic, and/or abnormal endoplasmic reticulum stress pathway activity, signaling, and/or regulation in the brain, neurons, and/or CNS and/or diseases or disorders thereof: HSPA5; MAPK8; XBP1; TRAF2; ATF6; CASP9; ATF4; EIF2AK3; CASP3; in the case of diseases or disorders associated with or involving aberrant, pathologic, and/or abnormal pyrimidine metabolism, signaling thereof, and/or regulation thereof in the brain, neurons, and/or CNS and/or diseases or disorders thereof: NME2; AICDA; RRM2; EIF2AK4; ENTPD1; RRM2B; NT5E; POLD1; NME1; in the case of diseases or disorders associated with or involving aberrant, pathologic, and/or abnormal Parkinson's signaling in the brain, neurons, and/or CNS and/or diseases or disorders thereof: UCHL1; MAPK8; MAPK13; MAPK14; CASP9; PARK7; PARK2; CASP3; in the case of diseases or disorders associated with or involving aberrant, pathologic, and/or abnormal Glycolysis/Gluconeogenesis activity, signaling, and/or regulation in the brain, neurons, and/or CNS and/or diseases or disorders thereof: HK2; GCK; GPI; ALDH1A1; PKM2; LDHA; HK1; in the case of diseases or disorders associated with or involving aberrant, pathologic, and/or abnormal interferon activity, signaling, and/or regulation in the brain, neurons, and/or CNS and/or diseases or disorders thereof: IRF1; SOCS1; JAK1; JAK2; IFITM1; STAT1; IFIT3; in the case of diseases or disorders associated with or involving aberrant, pathologic, and/or abnormal sonic the hedgehog activity, signaling, and/or regulation in the brain, neurons, and/or CNS and/or diseases or disorders thereof: ARRB2; SMO; GLI2; DYRKIA; GLI1; GSK3B; DYRK1B; in the case of diseases or disorders associated with or involving aberrant, pathologic, and/or abnormal glycerophospholipid metabolism, signaling thereof, and/or regulation thereof in the brain, neurons, and/or CNS and/or diseases or disorders thereof: PLD1; GRN; GPAM; YWHAZ; SPHK1; SPHK2; in the case of diseases or disorders associated with or involving aberrant, pathologic, and/or abnormal phospholipid degradation, signaling thereof, and/or regulation thereof in the brain, neurons, and/or CNS and/or diseases or disorders thereof: PRDX6; PLD1; GRN; YWHAZ; SPHK1; SPHK2; in the case of diseases or disorders associated with or involving aberrant, pathologic, and/or abnormal tryptophan metabolism, signaling thereof, and/or regulation thereof in the brain, neurons, and/or CNS and/or diseases or disorders thereof: SIAH2; PRMT5; NEDD4; ALDH1A1; CYP1B1; SIAH1; in the case of diseases or disorders associated with or involving aberrant, pathologic, and/or abnormal lysine degradation, signaling thereof, and/or regulation thereof in the brain, neurons, and/or CNS and/or diseases or disorders thereof: SUV39H1; EHMT2; NSD1; SETD7; PPP2R5C; in the case of diseases or disorders associated with or involving aberrant, pathologic, and/or abnormal nucleotide excision repair pathway activity, signaling thereof, and/or regulation thereof in the brain, neurons, and/or CNS and/or diseases or disorders thereof: ERCC5; ERCC4; XPA; XPC; ERCC1; in the case of diseases or disorders associated with or involving aberrant, pathologic, and/or abnormal nucleotide starch and sucrose metabolism, signaling thereof, and/or regulation thereof in the brain, neurons, and/or CNS and/or diseases or disorders thereof: UCHL1; HK2; GCK; GPI; HK1; in the case of diseases or disorders associated with or involving aberrant, pathologic, and/or abnormal aminosugars metabolism, signaling thereof, and/or regulation thereof in the brain, neurons, and/or CNS and/or diseases or disorders thereof: NQO1; HK2; GCK; HK1; in the case of diseases or disorders associated with or involving aberrant, pathologic, and/or abnormal arachidonic acid metabolism, signaling thereof, and/or regulation thereof in the brain, neurons, and/or CNS and/or diseases or disorders thereof: PRDX6; GRN; YWHAZ; CYP1B1; in the case of diseases or disorders associated with or involving aberrant, pathologic, and/or abnormal circadian rhythm signaling and/or regulation in the brain, neurons, and/or CNS and/or diseases or disorders thereof: CSNK1E; CREB1; ATF4; NR1D1; in the case of diseases or disorders associated with or involving aberrant, pathologic, and/or coagulation system activity signaling and/or regulation in the brain, neurons, and/or CNS and/or diseases or disorders thereof: BDKRB1; F2R; SERPINE1; F3; a PAR (e.g. PAR1, PAR2, etc.) PLC, aPC; in the case of diseases or disorders associated with or involving aberrant, pathologic, and/or abnormal dopamine receptor signaling and/or regulation in the brain, neurons, and/or CNS and/or diseases or disorders thereof: PPP2R1A; PPP2CA; PPP1CC; PPP2R5C; in the case of diseases or disorders associated with or involving aberrant, pathologic, and/or abnormal Glutathione Metabolism signaling and/or regulation in the brain, neurons, and/or CNS and/or diseases or disorders thereof: IDH2; GSTP1; ANPEP; IDH1; in the case of diseases or disorders associated with or involving aberrant, pathologic, and/or abnormal Glycerolipid Metabolism signaling and/or regulation in the brain, neurons, and/or CNS and/or diseases or disorders thereof: ALDH1A1; GPAM; SPHK1; SPHK2; in the case of diseases or disorders associated with or involving aberrant, pathologic, and/or abnormal Linoleic Acid Metabolism signaling and/or regulation in the brain, neurons, and/or CNS and/or diseases or disorders thereof: PRDX6; GRN; YWHAZ; CYP1B1; in the case of diseases or disorders associated with or involving aberrant, pathologic, and/or abnormal Methionine Metabolism signaling and/or regulation in the brain, neurons, and/or CNS and/or diseases or disorders thereof: DNMT1; DNMT3B; AHCY; DNMT3A; in the case of diseases or disorders associated with or involving aberrant, pathologic, and/or abnormal Pyruvate Metabolism signaling and/or regulation in the brain, neurons, and/or CNS and/or diseases or disorders thereof: GLO1; ALDH1A1; PKM2; LDHA; in the case of diseases or disorders associated with or involving aberrant, pathologic, and/or abnormal Arginine and Proline Metabolism signaling and/or regulation in the brain, neurons, and/or CNS and/or diseases or disorders thereof: ALDH1A1; NOS3; NOS2A; in the case of diseases or disorders associated with or involving aberrant, pathologic, and/or abnormal Eicosanoid signaling and/or regulation in the brain, neurons, and/or CNS and/or diseases or disorders thereof: PRDX6; GRN; YWHAZ; in the case of diseases or disorders associated with or involving aberrant, pathologic, and/or abnormal fructose and mannose metabolism signaling and/or regulation in the brain, neurons, and/or CNS and/or diseases or disorders thereof: HK2; GCK; HK1; in the case of diseases or disorders associated with or involving aberrant, pathologic, and/or abnormal antigen presentation pathway activity, signaling and/or regulation in the brain, neurons, and/or CNS and/or diseases or disorders thereof: CALR; B2M; in the case of diseases or disorders associated with or involving aberrant, pathologic, and/or abnormal steroid biosynthesis in the brain, neurons, and/or CNS and/or diseases or disorders thereof: NQO1; DHCR7; in the case of diseases or disorders associated with or involving aberrant, pathologic, and/or abnormal butanoate metabolism in the brain, neurons, and/or CNS and/or diseases or disorders thereof: ALDH1A1; NLGN1; in the case of diseases or disorders associated with or involving an aberrant, pathologic, and/or abnormal citrate cycle in the brain, neurons, and/or CNS and/or diseases or disorders thereof: IDH2; IDH1; in the case of diseases or disorders associated with or involving aberrant, pathologic, and/or abnormal fatty acid metabolism in the brain, neurons, and/or CNS and/or diseases or disorders thereof: ALDH1A1; CYP1B1; in the case of diseases or disorders associated with or involving aberrant, pathologic, and/or abnormal Glycerophospholipid metabolism in the brain, neurons, and/or CNS and/or diseases or disorders thereof: PRDX6; CHKA; in the case of diseases or disorders associated with or involving aberrant, pathologic, and/or abnormal histidine metabolism in the brain, neurons, and/or CNS and/or diseases or disorders thereof: PRMT5; ALDH1A1; in the case of diseases or disorders associated with or involving aberrant, pathologic, and/or abnormal inositol metabolism in the brain, neurons, and/or CNS and/or diseases or disorders thereof: ERO1L; APEX1; in the case of diseases or disorders associated with or involving aberrant, pathologic, and/or abnormal Phenylalanine metabolism in the brain, neurons, and/or CNS and/or diseases or disorders thereof: PRDX6; PRDX1; in the case of diseases or disorders associated with or involving aberrant, pathologic, and/or abnormal Seleno amino acid metabolism in the brain, neurons, and/or CNS and/or diseases or disorders thereof: PRMT5; AHCY; in the case of diseases or disorders associated with or involving aberrant, pathologic, and/or abnormal Sphingolipid metabolism in the brain, neurons, and/or CNS and/or diseases or disorders thereof: SPHK1; SPHK2; in the case of diseases or disorders associated with or involving aberrant, pathologic, and/or abnormal Aminophosphonate metabolism in the brain, neurons, and/or CNS and/or diseases or disorders thereof: PRMT5; in the case of diseases or disorders associated with or involving aberrant, pathologic, and/or abnormal androgen and/or estrogen metabolism in the brain, neurons, and/or CNS and/or diseases or disorders thereof: PRMT5; in the case of diseases or disorders associated with or involving aberrant, pathologic, and/or abnormal Ascorbate and Aldarate metabolism in the brain, neurons, and/or CNS and/or diseases or disorders thereof: ALDH1A1; in the case of diseases or disorders associated with or involving aberrant, pathologic, and/or abnormal Cysteine Metabolism in the brain, neurons, and/or CNS and/or diseases or disorders thereof: LDHA; in the case of diseases or disorders associated with or involving aberrant, pathologic, and/or abnormal fatty acid biosynthesis in the brain, neurons, and/or CNS and/or diseases or disorders thereof: FASN; in the case of diseases or disorders associated with or involving aberrant, pathologic, and/or abnormal glutamate receptor signaling in the brain, neurons, and/or CNS and/or diseases or disorders thereof: GNB2L1; in the case of diseases or disorders associated with or involving aberrant, pathologic, and/or abnormal Pentose Phosphate pathway in the brain, neurons, and/or CNS and/or diseases or disorders thereof: GPI; in the case of diseases or disorders associated with or involving aberrant, pathologic, and/or abnormal retinol metabolism in the brain, neurons, and/or CNS and/or diseases or disorders thereof: ALDH1A1; in the case of diseases or disorders associated with or involving aberrant, pathologic, and/or abnormal Pentose and Glucuronate interconversions in the brain, neurons, and/or CNS and/or diseases or disorders thereof: UCHL1; in the case of diseases or disorders associated with or involving aberrant, pathologic, and/or abnormal Riboflavin Metabolism in the brain, neurons, and/or CNS and/or diseases or disorders thereof: TYR; in the case of diseases or disorders associated with or involving aberrant, pathologic, and/or abnormal Tyrosine Metabolism in the brain, neurons, and/or CNS and/or diseases or disorders thereof: PRMT5, TYR; in the case of diseases or disorders associated with or involving aberrant, pathologic, and/or abnormal Ubiquinone biosynthesis in the brain, neurons, and/or CNS and/or diseases or disorders thereof: PRMT5; in the case of diseases or disorders associated with or involving aberrant, pathologic, and/or abnormal Valine, leucine and isoleucine degradation in the brain, neurons, and/or CNS and/or diseases or disorders thereof: ALDH1A1; in the case of diseases or disorders associated with or involving aberrant, pathologic, and/or abnormal glycine, serine, and threonine metabolism in the brain, neurons, and/or CNS and/or diseases or disorders thereof: CHKA; in the case of diseases or disorders associated with or involving aberrant, pathologic, and/or abnormal lysine degradation in the brain, neurons, and/or CNS and/or diseases or disorders thereof: ALDH1A1; in the case of diseases or disorders associated with or involving aberrant, pathologic, and/or abnormal pain or pain signaling or pain signal generation in the brain, neurons, and/or CNS and/or diseases or disorders thereof: TRPM7; TRPC5; TRPC6; TRPC1; Cnr1; cnr2; Grk2; Trpa1; Pomc; Cgrp; Crf; Pka; Era; Nr2b; TRPM5; Prkaca; Prkacb; Prkarla; Prkar2a; in the case of diseases or disorders associated with or involving aberrant, pathologic, and/or abnormal brain, neuron, and/or CNS development and/or diseases or disorders thereof: BMP-4; Chordin (Chrd); Noggin (Nog); WNT (Wnt2; Wnt2b; Wnt3a; Wnt4; Wnt5a; Wnt6; Wnt7b; Wnt8b; Wnt9a; Wnt9b; Wnt10a; Wnt10b; Wnt16); beta-catenin; Dkk-1; Frizzled related proteins; Otx-2; Gbx2; FGF-8; Reelin; Dabl; unc-86 (Pou4f1 or Brn3a); Numb; Reln; in the case of diseases or disorders associated with or involving prion disorders of or in the brain, neuron, and/or CNS and/or diseases or disorders thereof: Prp; in the case of substance or activity additions involving activities of the brain, neuron, and/or CNS: Prkce (alcohol); Drd2; Drd4; ABAT (alcohol); GRIA2; Grm5; Grin1; Htrlb; Grin2a; Drd3; Pdyn; Gria1 (alcohol); in the case of diseases or disorders associated with or involving PI3K/AKT signaling and/or regulation thereof in the brain, neuron, and/or CNS and/or diseases or disorders thereof: PRKCE; ITGAM; ITGA5; IRAK1; PRKAA2; EIF2AK2; PTEN; EIF4E; PRKCZ; GRK6; MAPK1; TSC1; PLK1; AKT2; IKBKB; PIK3CA; CDK8; CDKN1B; NFKB2; BCL2; PIK3CB; PPP2R1A; MAPK8; BCL2L1; MAPK3; TSC2; ITGA1; KRAS; EIF4EBP1; RELA; PRKCD; NOS3; PRKAA1; MAPK9; CDK2; PPP2CA; PIM1; ITGB7; YWHAZ; ILK; TP53; RAF1; IKBKG; RELB; DYRKIA; CDKN1A; ITGB1; MAP2K2; JAK1; AKT1; JAK2; PIK3R1; CHUK; PDPK1; PPP2R5C; CTNNB1; MAP2K1; NFKB1; PAK3; ITGB3; CCND1; GSK3A; FRAP1; SFN; ITGA2; TTK; CSNK1A1; BRAF; GSK3B; AKT3; FOXOl; SGK; HSP90AA1; RPS6KB1; in the case of diseases or disorders associated with or involving ERK/MAPK signaling and/or regulation thereof in the brain, neuron, and/or CNS and/or diseases or disorders thereof: PRKCE; ITGAM; ITGA5; HSPB1; IRAK1; PRKAA2; EIF2AK2; RAC1; RAPlA; TLN1; EIF4E; ELK1; GRK6; MAPK1; RAC2; PLK1; AKT2; PIK3CA; CDK8; CREB1; PRKCI; PTK2; FOS; RPS6KA4; PIK3CB; PPP2R1A; PIK3C3; MAPK8; MAPK3; ITGA1; ETS1; KRAS; MYCN; EIF4EBP1; PPARG; PRKCD; PRKAA1; MAPK9; SRC; CDK2; PPP2CA; PIM1; PIK3C2A; ITGB7; YWHAZ; PPP1CC; KSR1; PXN; RAF1; FYN; DYRKIA; ITGB1; MAP2K2; PAK4; PIK3R1; STAT3; PPP2R5C; MAP2K1; PAK3; ITGB3; ESR1; ITGA2; MYC; TTK; CSNK1A1; CRKL; BRAF; ATF4; PRKCA; SRF; STAT1; SGK; in the case of diseases or disorders associated with or involving glucocorticoid receptor signaling and/or regulation thereof in the brain, neuron, and/or CNS and/or diseases or disorders thereof: RAC1; TAF4B; EP300; SMAD2; TRAF6; PCAF; ELK1; MAPK1; SMAD3; AKT2; IKBKB; NCOR2; UBE2I; PIK3CA; CREB1; FOS; HSPA5; NFKB2; BCL2; MAP3K14; STAT5B; PIK3CB; PIK3C3; MAPK8; BCL2L1; MAPK3; TSC22D3; MAPK10; NRIP1; KRAS; MAPK13; RELA; STAT5A; MAPK9; NOS2A; PBX1; NR3C1; PIK3C2A; CDKN1C; TRAF2; SERPINE1; NCOA3; MAPK14; TNF; RAF1; IKBKG; MAP3K7; CREBBP; CDKN1A; MAP2K2; JAK1; IL8; NCOA2; AKT1; JAK2; PIK3R1; CHUK; STAT3; MAP2K1; NFKB1; TGFBR1; ESR1; SMAD4; CEBPB; JUN; AR; AKT3; CCL2; MMP1; STAT1; IL6; HSP90AA1; in the case of diseases or disorders associated with or involving ephrin receptor signaling and/or regulation thereof in the brain, neuron, and/or CNS and/or diseases or disorders thereof: PRKCE; ITGAM; ROCK1; ITGA5; CXCR4; IRAK1; PRKAA2; EIF2AK2; RACI; RAPlA; GRK6; ROCK2; MAPK1; PGF; RAC2; PTPN11; GNAS; PLK1; AKT2; DOK1; CDK8; CREB1; PTK2; CFL1; GNAQ; MAP3K14; CXCL12; MAPK8; GNB2L1; ABL1; MAPK3; ITGA1; KRAS; RHOA; PRKCD; PRKAA1; MAPK9; SRC; CDK2; PIM1; ITGB7; PXN; RAF1; FYN; DYRKIA; ITGB1; MAP2K2; PAK4; AKT1; JAK2; STAT3; ADAM10; MAP2K1; PAK3; ITGB3; CDC42; VEGFA; ITGA2; EPHA8; TTK; CSNK1A1; CRKL; BRAF; PTPN13; ATF4; AKT3; SGK; in the case of diseases or disorders associated with or involving B cell receptor signaling and/or regulation thereof in the brain, neuron, and/or CNS and/or diseases or disorders thereof: RAC1; PTEN; LYN; ELK1; MAPK1; RAC2; PTPN11; AKT2; IKBKB; PIK3CA; CREB1; SYK; NFKB2; CAMK2A; MAP3K14; PIK3CB; PIK3C3; MAPK8; BCL2L1; ABL1; MAPK3; ETS1; KRAS; MAPK13; RELA; PTPN6; MAPK9; EGRI; PIK3C2A; BTK; MAPK14; RAF1; IKBKG; RELB; MAP3K7; MAP2K2; AKT1; PIK3R1; CHUK; MAP2K1; NFKB1; CDC42; GSK3A; FRAP1; BCL6; BCL10; JUN; GSK3B; ATF4; AKT3; VAV3; RPS6KB1.

[0478] Additional non-limiting examples of disease-associated genes and polynucleotides and disease specific information is available from McKusick-Nathans Institute of Genetic Medicine, Johns Hopkins University (Baltimore, Md.) and National Center for Biotechnology Information, National Library of Medicine (Bethesda, Md.), available on the World Wide Web. Any of these can be appropriate to be treated by one or more of the methods described herein. In some embodiments, the disease is a muscle disease or disorder, neuro-muscular disease or disorder, or a cardiomyopathy. In some embodiments, the disease or disorder selected from any one or more of the following: (a) an auto immune disease; (b) a cancer; (c) a muscular dystrophy; (d) a neuro-muscular disease; (e) a sugar or glycogen storage disease; (f) an expanded repeat disease; (g) a dominant negative disease; (h) a cardiomyopathy; (i) a viral disease; (j) a progeroid disease; or (k) any combination thereof.

[0479] In some embodiments, the expanded repeat disease is Huntington's disease, a Myotonic Dystrophy, or Facioscapulohumeral muscular dystrophy (FSHD). In some embodiments, the muscular dystrophy is Duchene muscular dystrophy, Becker Muscular dystrophy, a Limb-Girdle muscular dystrophy, an Emery-Dreifuss muscular dystrophy, a myotonic dystrophy, or FSHD. In some embodiments, the myotonic dystrophy is Type 1 or Type 2. In some embodiments, the cardiomyopathy is dilated cardiomyopathy, hypertrophic cardiomyopathy, DMD-associated cardiomyopathy, or Dannon disease. In some embodiments, the sugar or glycogen storage disease is a MPS type III disease or Pompe disease. In some embodiments, the MPS type III disease, is MPS Type IIIA, IIIB, IIIC, or IIID. In some embodiments, the neuro-muscular disease is Charcot-Marie-Tooth disease or Friedreich's Ataxia.

[0480] More specifically, Mutations in these genes and pathways can result in production of improper proteins or proteins in improper amounts which affect function. Further examples of genes, diseases and proteins are hereby incorporated by reference from U.S. Provisional application 61/736,527 filed Dec. 12, 2012. Such genes, proteins and pathways may be the target polynucleotide of a CRISPR complex or other method of gene modification of the present invention. Examples of disease-associated and/or cell function-associated genes and polynucleotides are listed in Tables 2 and 3. Additional examples are discussed elsewhere herein.

TABLE 2
Exemplary Genetic and Other Diseases and Associated Genes

| | Primary | Additional | |
|---|---|---|---|
| | Tissues or | Tissues/ | |
| | System | Systems | |
| Disease Name | Affected | Affected | Genes |
| Achondroplasia | Bone and | | fibroblast growth factor receptor 3 |
| | Muscle | | (FGFR3) |
| Achromatopsia | eye | | CNGA3, CNGB3, GNAT2, PDE6C, |
| | | | PDE6H, ACHM2, ACHM3, |
| Acute Renal Injury | kidney | | NFkappaB, AATF, p85alpha, FAS, |
| | | | Apoptosis cascade elements (e.g. |
| | | | FASR, Caspase 2, 3, 4, 6, 7, 8, 9, 10, |
| | | | AKT, TNF alpha, IGF1, IGF1R, |
| | | | RIPK1), p53 |
| Age Related Macular | eye | | Abcr; CCL2; CC2; CP |
| Degeneration | | | (ceruloplasmin); Timp3; cathepsinD; |
| | | | VLDLR, CCR2 |
| AIDS | Immune | | KIR3DL1, NKAT3, NKB1, AMB11, |
| | System | | KIR3DS1, IFNG, CXCL12, SDF1 |
| Albinism (including | Skin, hair, | | TYR, OCA2, TYRP1, and SLC45A2, |
| oculocutaneous albinism (types | eyes, | | SLC24A5 and C10orf11 |
| 1-7) and ocular albinism) | | | |
| Alkaptonuria | Metabolism of | Tissues/organs | HGD |
| | amino acids | where | |
| | | homogentisic | |
| | | acid | |
| | | accumulates, | |
| | | particularly | |
| | | cartilage (joints), | |
| | | heart valves, | |
| | | kidneys | |
| alpha-1 antitrypsin deficiency | Lung | Liver, skin, | SERPINA1, those set forth in |
| (AATD or A1AD) | | vascular system, | WO2017165862, PiZ allele |
| | | kidneys, GI | |
| ALS | CNS | | SOD1; ALS2; ALS3; ALS5; ALS7; |
| | | | STEX; FUS; TARDBP; VEGF |
| | | | (VEGF-a; VEGF-b; VEGF-c); DPP6; |
| | | | NEFH, PTGS1, SLC1A2, |
| | | | TNFRSF10B, PRPH, HSP90AA1, |
| | | | CRIA2, IFNG, AMPA2 S100B, FGF2, |
| | | | AOX1, CS, TXN, RAPHJ1, MAP3K5, |
| | | | NBEAL1, GPX1, ICA1L, RAC1, |
| | | | MAPT, ITPR2, ALS2CR4, GLS, |
| | | | ALS2CR8, CNTFR, ALS2CR11, |
| | | | FOLH1, FAM117B, P4HB, CNTF, |
| | | | SQSTM1, STRADB, NAIP, NLR, |
| | | | YWHAQ, SLC33A1, TRAK2, SCA1, |
| | | | NIF3L1, NIF3, PARD3B, COX8A, |
| | | | CDK15, HECW1, HECT, C2, WW 15, |
| | | | NOS1, MET, SOD2, HSPB1, NEFL, |
| | | | CTSB, ANG, HSPA8, RNase A, |
| | | | VAPB, VAMP, SNCA, alpha HGF, |
| | | | CAT, ACTB, NEFM, TH, BCL2, |
| | | | FAS, CASP3, CLU, SMN1, G6PD, |
| | | | BAX, HSF1, RNF19A, JUN, |
| | | | ALS2CR12, HSPA5, MAPK14, |
| | | | APEX1, TXNRD1, NOS2, TIMP1, |
| | | | CASP9, XIAP, GLG1, EPO, VEGFA, |
| | | | ELN, GDNF, NFE2L2, SLC6A3, |
| | | | HSPA4, APOE, PSMB8, DCTN2, |
| | | | TIMP3, KIFAP3, SLC1A1, SMN2, |
| | | | CCNC, STUB1, ALS2, PRDX6, SYP, |
| | | | CABIN1, CASP1, GART, CDK5, |
| | | | ATXN3, RTN4, C1QB, VEGFC, |
| | | | HTT, PARK7, XDH, GFAP, MAP2, |
| | | | CYCS, FCGR3B, CCS, UBL5, |
| | | | MMP9m SLC18A3, TRPM7, HSPB2, |
| | | | AKT1, DEERL1, CCL2, NGRN, GSR, |
| | | | TPPP3, APAF1, BTBD10, GLUD1, |
| | | | CXCR4, S:C1A3, FLT1, PON1, AR, |
| | | | LIF, ERBB3, :GA:S1, CD44, TP53, |
| | | | TLR3, GRIA1, GAPDH, AMPA, |
| | | | GRIK1, DES, CHAT, FLT4, |
| | | | CHMP2B, BAG1, CHRNA4, GSS, |
| | | | BAK1, KDR, GSTP1, OGG1, IL6 |
| Alzheimer's Disease | Brain | | E1; CHIP; UCH; UBB; Tau; LRP; |
| | | | PICALM; CLU; PS1; SORL1; CR1; |
| | | | VLDLR; UBA1; UBA3; CHIP28; |
| | | | AQP1; UCHL1; UCHL3; APP, AAA, |
| | | | CVAP, AD1, APOE, AD2, DCP1, |
| | | | ACE1, MPO, PACIP1, PAXIP1L, |
| | | | PTIP, A2M, BLMH, BMH, PSEN1, |
| | | | AD3, ALAS2, ABCA1, BIN1, BDNF, |
| | | | BTNL8, C1ORF49, CDH4, CHRNB2, |
| | | | CKLFSF2, CLEC4E, CR1L, CSF3R, |
| | | | CST3, CYP2C, DAPK1, ESR1, |
| | | | FCAR, FCGR3B, FFA2, FGA, GAB2, |
| | | | GALP, GAPDHS, GMPB, HP, HTR7, |
| | | | IDE, IF127, IFI6, IFIT2, ILIRN, IL- |
| | | | IRA, IL8RA, IL8RB, JAG1, KCNJ15, |
| | | | LRP6, MAPT, MARK4, MPHOSPH1, |
| | | | MTHFR, NBN, NCSTN, NIACR2, |
| | | | NMNAT3, NTM, ORM1, P2RY13, |
| | | | PBEF1, PCK1, PICALM, PLAU, |
| | | | PLXNC1, PRNP, PSEN1, PSEN2, |
| | | | PTPRA, RALGPS2, RGSL2, |
| | | | SELENBP1, SLC25A37, SORL1, |
| | | | Mitoferrin-1, TF, TFAM, TNF, |
| | | | TNFRSF10C, UBE1C |
| Amyloidosis | | | APOA1, APP, AAA, CVAP, AD1, |
| | | | GSN, FGA, LYZ, TTR, PALB |
| Amyloid neuropathy | | | TTR, PALB |
| Anemia | Blood | | CDAN1, CDA1, RPS19, DBA, PKLR, |
| | | | PK1, NT5C3, UMPH1, PSN1, RHAG, |
| | | | RH50A, NRAMP2, SPTB, ALAS2, |
| | | | ANH1, ASB, ABCB7, ABC7, ASAT |
| Angelman Syndrome | Nervous system, | | UBE3A |
| | brain | | |
| Attention Deficit Hyperactivity | Brain | | PTCHD1 |
| Disorder (ADHD) | | | |
| Autoimmune lymphoproliferative | Immune system | | TNFRSF6, APT1, FAS, CD95, |
| syndrome | | | ALPS1A |
| Autism, Autism spectrum | Brain | | PTCHD1; Mecp2; BZRAP1; MDGA2; |
| disorders (ASDs), including | | | Sema5A; Neurexin 1; GLO1, RTT, |
| Asperger's and a general | | | PPMX, MRX16, RX79, NLGN3, |
| diagnostic category called | | | NLGN4, KIAA1260, AUTSX2, |
| Pervasive Developmental | | | FMR1, FMR2; FXR1; FXR2; |
| Disorders (PDDs) | | | MGLUR5, ATP10C, CDH10, GRM6, |
| | | | MGLUR6, CDH9, CNTN4, NLGN2, |
| | | | CNTNAP2, SEMA5A, DHCR7, |
| | | | NLGN4X, NLGN4Y, DPP6, NLGN5, |
| | | | EN2, NRCAM, MDGA2, NRXN1, |
| | | | FMR2, AFF2, FOXP2, OR4M2, |
| | | | OXTR, FXR1, FXR2, PAH, |
| | | | GABRA1, PTEN, GABRA5, PTPRZ1, |
| | | | GABRB3, GABRG1, HIRIP3, |
| | | | SEZ6L2, HOXA1, SHANK3, IL6, |
| | | | SHBZRAP1, LAMB1, SLC6A4, |
| | | | SERT, MAPK3, TAS2R1, MAZ, |
| | | | TSC1, MDGA2, TSC2, MECP2, |
| | | | UBE3A, WNT2, see also |
| | | | 20110023145 |
| autosomal dominant polycystic | kidney | liver | PKD1, PKD2 |
| kidney disease (ADPKD)— | | | |
| (includes diseases such as von | | | |
| Hippel-Lindau disease and | | | |
| tuberous sclerosis complex | | | |
| disease) | | | |
| Autosomal Recessive Polycystic | kidney | liver | PKDH1 |
| Kidney Disease (ARPKD) | | | |
| Ataxia-Telangiectasia (a.k.a | Nervous system, | various | ATM |
| Louis Bar syndrome) | immune system | | |
| B-Cell Non-Hodgkin Lymphoma | | | BCL7A, BCL7 |
| Bardet-Biedl syndrome | Eye | Liver, ear, | ARL6, BBS1, BBS2, BBS4, BBS5, |
| | musculoskeletal | gastrointestinal | BBS7, BBS9, BBS10, BBS12, |
| | system, kidney, | system, brain | CEP290, INPP5E, LZTFL1, MKKS, |
| | reproductive | | MKS1, SDCCAG8, TRIM32, TTC8 |
| | organs | | |
| Bare Lymphocyte Syndrome | blood | | TAPBP, TPSN, TAP2, ABCB3, PSF2, |
| | | | RING11, MHC2TA, C2TA, RFX5, |
| | | | RFXAP, RFX5 |
| Bartter's Syndrome (types I, II, | kidney | | SLC12A1 (type I), KCNJ1 (type II), |
| III, IVA and B, and V) | | | CLCNKB (type III), BSND (type IV |
| | | | A), or both the CLCNKA CLCNKB |
| | | | genes (type IV B), CASR (type V). |
| Becker muscular dystrophy | Muscle | | DMD, BMD, MYF6 |
| Best Disease (Vitelliform | eye | | VMD2 |
| Macular Dystrophy type 2 ) | | | |
| Bleeding Disorders | blood | | TBXA2R, P2RX1, P2X1 |
| Blue Cone Monochromacy | eye | | OPNILW, OPN1MW, and LCR |
| Breast Cancer | Breast tissue | | BRCA1, BRCA2, COX-2 |
| Bruton's Disease (aka X-linked | Immune system, | | BTK |
| Agammglobulinemia) | specifically B | | |
| | cells | | |
| Cancers (e.g., lymphoma, chronic | Various | | FAS, BID, CTLA4, PDCD1, CBLB, |
| lymphocytic leukemia (CLL), B | | | PTPN6, TRAC, TRBC, those |
| cell acute lymphocytic leukemia | | | described in WO2015048577 |
| (B-ALL), acute lymphoblastic | | | |
| leukemia, acute myeloid | | | |
| leukemia, non-Hodgkin's | | | |
| lymphoma (NHL), diffuse large | | | |
| cell lymphoma (DLCL), multiple | | | |
| myeloma, renal cell carcinoma | | | |
| (RCC), neuroblastoma, colorectal | | | |
| cancer, breast cancer, ovarian | | | |
| cancer, melanoma, sarcoma, | | | |
| prostate cancer, lung cancer, | | | |
| esophageal cancer, hepatocellular | | | |
| carcinoma, pancreatic cancer, | | | |
| astrocytoma, mesothelioma, head | | | |
| and neck cancer, and | | | |
| medulloblastoma | | | |
| Cardiovascular Diseases | heart | Vascular system | |
| | | | IL1B, XDH, TP53, PTGS, MB, IL4, |
| | | | ANGPT1, ABCGu8, CTSK, PTGIR, |
| | | | KCNJ11, INS, CRP, PDGFRB, |
| | | | CCNA2, PDGFB, KCNJ5, KCNN3, |
| | | | CAPN10, ADRA2B, ABCG5, |
| | | | PRDX2, CPAN5, PARP14, MEX3C, |
| | | | ACE, RNF, IL6, TNF, STN, |
| | | | SERPINE1, ALB, ADIPOQ, APOB, |
| | | | APOE, LEP, MTHFR, APOA1, |
| | | | EDN1, NPPB, NOS3, PPARG, PLAT, |
| | | | PTGS2, CETP, AGTR1, HMGCR, |
| | | | IGF1, SELE, REN, PPARA, PONI, |
| | | | KNG1, CCL2, LPL, VWF, F2, |
| | | | ICAM1, TGFB, NPPA, IL10, EPO, |
| | | | SOD1, VCAM1, IFNG, LPA, MPO, |
| | | | ESR1, MAPK, HP, F3, CST3, COG2, |
| | | | MMP9, SERPINC1, F8, HMOX1, |
| | | | APOC3, IL8, PROL1, CBS, NOS2, |
| | | | TLR4, SELP, ABCA1, AGT, LDLR, |
| | | | GPT, VEGFA, NR3C2, IL18, NOS1, |
| | | | NR3C1, FGB, HGF, IL1A, AKT1, |
| | | | LIPC, HSPD1, MAPK14, SPP1, |
| | | | ITGB3, CAT, UTS2, THBD, F10, CP, |
| | | | TNFRSF11B, EGFR, MMP2, PLG, |
| | | | NPY, RHOD, MAPK8, MYC, FN1, |
| | | | CMA1, PLAU, GNB3, ADRB2, |
| | | | SOD2, F5, VDR, ALOX5, HLA- |
| | | | DRB1, PARP1, CD40LG, PON2, |
| | | | AGER, IRS1, PTGS1, ECE1, F7, |
| | | | IRMN, EPHX2, IGFBP1, MAPK10, |
| | | | FAS, ABCB1, JUN, IGFBP3, CD14, |
| | | | PDE5A, AGTR2, CD40, LCAT, |
| | | | CCR5, MMP1, TIMP1, ADM, |
| | | | DYT10, STAT3, MMP3, ELN, USF1, |
| | | | CFH, HSPA4, MMP12, MME, F2R, |
| | | | SELL, CTSB, ANXA5, ADRB1, |
| | | | CYBA, FGA, GGT1, LIPG, HIF1A, |
| | | | CXCR4, PROC, SCARB1, CD79A, |
| | | | PLTP, ADD1, FGG, SAA1, KCNH2, |
| | | | DPP4, NPR1, VTN, KIAA0101, FOS, |
| | | | TLR2, PPIG, IL1R1, AR, CYP1A1, |
| | | | SERPINA1, MTR, RBP4, APOA4, |
| | | | CDKN2A, FGF2, EDNRB, ITGA2, |
| | | | VLA-2, CABIN1, SHBG, HMGB1, |
| | | | HSP90B2P, CYP3A4, GJA1, CAVI, |
| | | | ESR2, LTA, GDF15, BDNF, |
| | | | CYP2D6, NGF, SP1, TGIF1, SRC, |
| | | | EGF, PIK3CG, HLA-A, KCNQ1, |
| | | | CNR1, FBN1, CHKA, BEST1, |
| | | | CTNNB1, IL2, CD36, PRKAB1, TPO, |
| | | | ALDH7A1, CX3CR1, TH, F9, CH1, |
| | | | TF, HFE, IL17A, PTEN, GSTM1, |
| | | | DMD, GATA4, F13A1, TTR, FABP4, |
| | | | PON3, APOC1, INSR, TNFRSF1B, |
| | | | HTR2A, CSF3, CYP2C9, TXN, |
| | | | CYP11B2, PTH, CSF2, KDR, |
| | | | PLA2G2A, THBS1, GCG, RHOA, |
| | | | ALDH2, TCF7L2, NFE2L2, |
| | | | NOTCH1, UGT1A1, IFNA1, PPARD, |
| | | | SIRT1, GNHR1, PAPPA, ARR3, |
| | | | NPPC, AHSP, PTK2, IL13, MTOR, |
| | | | ITGB2, GSTT1, IL6ST, CPB2, |
| | | | CYP1A2, HNF4A, SLC64A, |
| | | | PLA2G6, TNFSF11, SLC8A1, F2RL1, |
| | | | AKR1A1, ALDH9A1, BGLAP, |
| | | | MTTP, MTRR, SULT1A3, RAGE, |
| | | | C4B, P2RY12, RNLS, CREB1, |
| | | | POMC, RACI, LMNA, CD59, |
| | | | SCM5A, CYP1B1, MIF, MMP13, |
| | | | TIMP2, CYP19A1, CUP21A2, |
| | | | PTPN22, MYH14, MBL2, SELPLG, |
| | | | AOC3, CTSL1, PCNA, IGF2, ITGB1, |
| | | | CAST, CXCL12, IGHE, KCNE1, |
| | | | TFRC, COL1A1, COL1A2, IL2RB, |
| | | | PLA2G10, ANGPT2, PROCR, NOX4, |
| | | | HAMP, PTPN11, SLCA1, IL2RA, |
| | | | CCL5, IRF1, CF:AR, CA:CA, EIF4E, |
| | | | GSTP1, JAK2, CYP3A5, HSPG2, |
| | | | CCL3, MYD88, VIP, SOAT1, |
| | | | ADRBK1, NR4A2, MMP8, NPR2, |
| | | | GCH1, EPRS, PPARGC1A, F12, |
| | | | PECAM1, CCL4, CERPINA34, |
| | | | CASR, FABP2, TTF2, PROS1, CTF1, |
| | | | SGCB, YME1L1, CAMP, ZC3H12A, |
| | | | AKR1B1, MMP7, AHR, CSF1, |
| | | | HDAC9, CTGF, KCNMA1, UGT1A, |
| | | | PRKCA, COMT, S100B, EGR1, PRL, |
| | | | IL15, DRD4, CAMK2G, SLC22A2, |
| | | | CCL11, PGF, THPO, GP6, TACR1, |
| | | | NTS, HNF1A, SST, KCDN1, |
| | | | LOC646627, TBXAS1, CUP2J2, |
| | | | TBXA2R, ADHIC, ALOX12, AHSG, |
| | | | BHMT, GJA4, SLC25A4, ACLY, |
| | | | ALOX5AP, NUMA1, CYP27B1, |
| | | | CYSLTR2, SOD3, LTC4S, UCN, |
| | | | GHRL, APOC2, CLEC4A, |
| | | | KBTBD10, TNC, TYMS, SHC1, |
| | | | LRP1, SOCS3, ADHIB, KLK3, |
| | | | HSD11B1, VKORC1, SERPINB2, |
| | | | TNS1, RNF19A, EPOR, ITGAM, |
| | | | PITX2, MAPK7, FCGR3A, LEEPR, |
| | | | ENG, GPX1, GOT2, HRH1, NR112, |
| | | | CRH, HTR1A, VDAC1, HPSE, |
| | | | SFTPD, TAP2, RMF123, PTK2Bm |
| | | | NTRK2, IL6R, ACHE, GLP1R, GHR, |
| | | | GSR, NQO1, NR5A1, GJB2, |
| | | | SLC9A1, MAOA, PCSK9, FCGR2A, |
| | | | SERPINF1, EDN3, UCP2, TFAP2A, |
| | | | C4BPA, SERPINF2, TYMP, ALPP, |
| | | | CXCR2, SLC3A3, ABCG2, ADA, |
| | | | JAK3, HSPA1A, FASN, FGF1, F11, |
| | | | ATP7A, CR1, GFPA, ROCK1, |
| | | | MECP2, MYLK, BCHE, LIPE, |
| | | | ADORA1, WRN, CXCR3, CD81, |
| | | | SMAD7, LAMC2, MAP3K5, CHGA, |
| | | | IAPP, RHO, ENPP1, PTHLH, NRG1, |
| | | | VEGFC, ENPEP, CEBPB, NAGLU,. |
| | | | F2RL3, CX3CL1, BDKRB1, |
| | | | ADAMTS13, ELANE, ENPP2, CISH, |
| | | | GAST, MYOC, ATP1A2, NF1, GJB1, |
| | | | MEF2A, VCL, BMPR2, TUBB, |
| | | | CDC42, KRT18, HSF1, MYB, |
| | | | PRKAA2, ROCK2, TFP1, PRKG1, |
| | | | BMP2, CTNND1, CTH, CTSS, |
| | | | VAV2, NPY2R, IGFBP2, CD28, |
| | | | GSTA1, PPIA, APOH, S100A8, IL11, |
| | | | ALOX15, FBLN1, NR1H3, SCD, GIP, |
| | | | CHGB, PRKCB, SRD5A1, HSD11B2, |
| | | | CALCRL, GALNT2, ANGPTL4, |
| | | | KCNN4, PIK3C2A, HBEGF, |
| | | | CYP7A1, HLA-DRB5, BNIP3, |
| | | | GCKR, S100A12, PADI4, HSPA14, |
| | | | CXCR1, H19, KRTAP19-3, IDDM2, |
| | | | RAC2, YRY1, CLOCK, NGFR, DBH, |
| | | | CHRNA4, CACNAIC, PRKAG2, |
| | | | CHAT, PTGDS, NR1H2, TEK, |
| | | | VEGFB, MEF2C, MAPKAPK2, |
| | | | TNFRSF11A, HSPA9, CYSLTR1, |
| | | | MATIA, OPRL1, IMPA1, CLCN2, |
| | | | DLD, PSMA6, PSMB8, CHI3L1, |
| | | | ALDH1B1, PARP2,STAR, LBP, |
| | | | ABCC6, RGS2, EFNB2, GJB6, |
| | | | APOA2, AMPD1, DYSF, |
| | | | FDFT1,EMD2, CCR6, GJB3, IL1RL1, |
| | | | ENTPD1, BBS4, CELSR2, F11R, |
| | | | RAPGEF3, HYAL1, ZNF259, |
| | | | ATOX1, ATF6, KHK, SATI, GGH, |
| | | | TIMP4, SLC4A4, PDE2A, PDE3B, |
| | | | FADS1, FADS2, TMSB4X, TXNIP, |
| | | | LIMS1, RHOB, LY96, FOXO1, |
| | | | PNPLA2,TRH, GJC1, S:C17A5, FTO, |
| | | | GJD2, PRSC1, CASP12, GPBAR1, |
| | | | PXK, IL33, TRIB1, PBX4, NUPR1, |
| | | | 15-SEP, CILP2, TERC, GGT2, |
| | | | MTCO1, UOX, AVP, ANGPLT3 |
| Cataract | eye | | CRYAA, CRYA1, CRYBB2, CRYB2, |
| | | | PITX3, BFSP2, CP49, CP47, CRYAA, |
| | | | CRYA1, PAX6, AN2, MGDA, |
| | | | CRYBA1, CRYB1, CRYGC, CRYG3, |
| | | | CCL, LIM2, MP19, CRYGD, CRYG4, |
| | | | BFSP2, CP49, CP47, HSF4, CTM, |
| | | | HSF4, CTM, MIP, AQPO, CRYAB, |
| | | | CRYA2, CTPP2, CRYBB1, CRYGD, |
| | | | CRYG4, CRYBB2, CRYB2, CRYGC, |
| | | | CRYG3, CCL, CRYAA, CRYA1, |
| | | | GJA8, CX50, CAE1, GJA3, CX46, |
| | | | CZP3, CAE3, CCM1, CAM, KRIT1 |
| CDKL-5 Deficiencies or | Brain, CNS | | CDKL5 |
| Mediated Diseases | | | |
| Charcot-Marie-Tooth (CMT) | Nervous system | Muscles | PMP22 (CMT1A and E), MPZ |
| disease (Types 1, 2, 3, 4,) | | (dystrophy) | (CMT1B), LITAF (CMT1C), EGR2 |
| | | | (CMT1D), NEFL (CMT1F), GJB1 |
| | | | (CMT1X), MFN2 (CMT2A), KIF1B |
| | | | (CMT2A2B), RAB7A (CMT2B), |
| | | | TRPV4 (CMT2C), GARS (CMT2D), |
| | | | NEFL (CMT2E), GAPD1 (CMT2K), |
| | | | HSPB8 (CMT2L), DYNC1H1, |
| | | | CMT2O), LRSAM1 (CMT2P), |
| | | | IGHMBP2 (CMT2S), MORC2 |
| | | | (CMT2Z), GDAP1 (CMT4A), |
| | | | MTMR2 or SBF2/MTMR13 |
| | | | (CMT4B), SH3TC2 (CMT4C), |
| | | | NDRG1 (CMT4D), PRX (CMT4F), |
| | | | FIG4 (CMT4J), NT-3 |
| Chediak-Higashi Syndrome | Immune system | Skin, hair, eyes, | LYST |
| | | neurons | |
| Choroideremia | | | CHM, REP1, |
| Chorioretinal atrophy | eye | | PRDM13, RGR, TEAD1 |
| Chronic Granulomatous Disease | Immune system | | CYBA, CYBB, NCF1, NCF2, NCF4 |
| Chronic Mucocutaneous | Immune system | | AIRE, CARD9, CLEC7A IL12B, |
| Candidiasis | | | IL12B1, IL1F, IL17RA, IL17RC, |
| | | | RORC, STAT1, STAT3, TRAF31P2 |
| Cirrhosis | liver | | KRT18, KRT8, CIRH1A, NAIC, |
| | | | TEX292, KIAA1988 |
| Colon cancer (Familial | Gastrointestinal | | FAP: APC |
| adenomatous polyposis (FAP) | | | HNPCC: MSH2, MLH1, PMS2, SH6, |
| and hereditary nonpolyposis | | | PMS1 |
| colon cancer (HNPCC)) | | | |
| Combined Immunodeficiency | Immune System | | IL2RG, SCIDX1, SCIDX, IMD4); |
| | | | HIV-1 (CCL5, SCYA5, D17S136E, |
| | | | TCP228 |
| Cone(-rod) dystrophy | eye | | AIPL1, CRX, GUAIA, GUCY2D, |
| | | | PITPM3, PROM1, PRPH2, RIMS1, |
| | | | SEMA4A, ABCA4, ADAM9, ATF6, |
| | | | C21ORF2, C8ORF37, CACNA2D4, |
| | | | CDHR1, CERKL, CNGA3, CNGB3, |
| | | | CNNM4, CNAT2, IFT81, KCNV2, |
| | | | PDE6C, PDE6H, POCIB, RAX2, |
| | | | RDH5, RPGRIP1, TTLL5, RetCG1, |
| | | | GUCY2E |
| Congenital Stationary Night | eye | | CABP4, CACNAIF, CACNA2D4, |
| Blindness | | | GNAT1, CPR179, GRK1, GRM6, |
| | | | LRIT3, NYX, PDE6B, RDH5, RHO, |
| | | | RLBP1, RPE65, SAG, SLC24A1, |
| | | | TRPM1, |
| Congenital Fructose Intolerance | Metabolism | | ALDOB |
| Cori's Disease (Glycogen Storage | Various- | | AGL |
| Disease Type III) | wherever | | |
| | glycogen | | |
| | accumulates, | | |
| | particularly | | |
| | liver, heart, | | |
| | skeletal muscle | | |
| Corneal clouding and dystrophy | eye | | APOA1, TGFBI, CSD2, CDGG1, |
| | | | CSD, BIGH3, CDG2, TACSTD2, |
| | | | TROP2, M1S1, VSX1, RINX, PPCD, |
| | | | PPD, KTCN, COL8A2, FECD, |
| | | | PPCD2, PIP5K3, CFD |
| Cornea plana congenital | | | KERA, CNA2 |
| Cri du chat Syndrome, also | | | Deletions involving only band 5p15.2 |
| known as 5p syndrome and cat | | | to the entire short arm of chromosome |
| cry syndrome | | | 5, e.g. CTNND2, TERT |
| Cystic Fibrosis (CF) | Lungs and | Pancreas, liver, | CTFR, ABCC7, CF, MRP7, SCNN1A, |
| | respiratory | digestive | those described in WO2015157070 |
| | system | system, | |
| | | reproductive | |
| | | system, | |
| | | exocrine, glands, | |
| Diabetic nephropathy | kidney | | Gremlin, 12/15- lipoxygenase, TIM44 |
| Dent Disease (Types 1 and 2) | Kidney | | Type 1: CLCN5, Type 2: ORCL |
| Dentatorubral-Pallidoluysian | CNS, brain, | | Atrophin-1 and Atn1 |
| Atrophy (DRPLA) (aka Haw | muscle | | |
| River and Naito-Oyanagi | | | |
| Disease) | | | |
| Down Syndrome | various | | Chromosome 21 trisomy |
| Drug Addiction | Brain | | Prkce; Drd2; Drd4; ABAT; GRIA2; |
| | | | Grm5; Grin1; Htr1b; Grin2a; Drd3; |
| | | | Pdyn; Gria1 |
| Duane syndrome (Types 1, 2, and | eye | | CHN1, indels on chromosomes 4 and 8 |
| 3, including subgroups A, B and | | | |
| C). Other names for this | | | |
| condition include Duane's | | | |
| Retraction Syndrome (or DR | | | |
| syndrome), Eye Retraction | | | |
| Syndrome, Retraction Syndrome, | | | |
| Congenital retraction syndrome | | | |
| and Stilling-Turk-Duane | | | |
| Syndrome | | | |
| Duchenne muscular dystrophy | muscle | Cardiovascular, | DMD, BMD, dystrophin gene, intron |
| (DMD) | | respiratory | flanking exon 51 of DMD gene, exon |
| | | | 51 mutations in DMD gene, see also |
| | | | WO2013163628 and US Pat. Pub. |
| | | | 20130145487 |
| Edward's Syndrome | | | Complete or partial trisomy of |
| (Trisomy 18) | | | chromosome 18 |
| Ehlers-Danlos Syndrome (Types | Various | | COL5A1, COL5A2, COL1A1, |
| I-VI) | depending on | | COL3A1, TNXB, PLOD1, COL1A2, |
| | type: including | | FKBP14 and ADAMTS2 |
| | musculoskeletal, | | |
| | eye, vasculature, | | |
| | immune, and | | |
| | skin | | |
| Emery-Dreifuss muscular | muscle | | LMNA, LMN1, EMD2, FPLD, |
| dystrophy | | | CMD1A, HGPS, LGMD1B, LMNA, |
| | | | LMN1, EMD2, FPLD, CMD1A |
| Enhanced S-Cone Syndrome | eye | | NR2E3, NRL |
| Fabry's Disease | Various— | | GLA |
| | including skin, | | |
| | eyes, and | | |
| | gastrointestinal | | |
| | system, kidney, | | |
| | heart, brain, | | |
| | nervous system | | |
| Facioscapulohumeral muscular | muscles | | FSHMD1A, FSHD1A, FRG1, |
| dystrophy | | | |
| Factor H and Factor H-like 1 | blood | | HF1, CFH, HUS |
| Factor V Leiden thrombophilia | blood | | Factor V (F5) |
| and Factor V deficiency | | | |
| Factor V and Factor VII | blood | | MCFD2 |
| deficiency | | | |
| Factor VII deficiency | blood | | F7 |
| Factor X deficiency | blood | | F10 |
| Factor XI deficiency | blood | | F11 |
| Factor XII deficiency | blood | | F12, HAF |
| Factor XIIIA deficiency | blood | | F13A1, F13A |
| Factor XIIIB deficiency | blood | | F13B |
| Familial Hypercholesterolemia | Cardiovascular | | APOB, LDLR, PCSK9 |
| | system | | |
| Familial Mediterranean Fever | Various— | Heart, kidney, | MEFV |
| (FMF) also called recurrent | organs/tissues | brain/CNS, | |
| polyserositis or familial | with serous or | reproductive | |
| paroxysmal polyserositis | synovial | organs | |
| | membranes, | | |
| | skin, joints | | |
| Fanconi Anemia | Various—blood | | FANCA, FACA, FAI, FA, FAA, |
| | (anemia), | | FAAP95, FAAP90, FLJ34064, |
| | immune system, | | FANCC, FANCG, RAD51, BRCA1, |
| | cognitive, | | BRCA2, BRIP1, BACH1, FANCJ, |
| | kidneys, eyes, | | FANCB, FANCD1, FANCD2, |
| | musculoskeletal | | FANCD, FAD, FANCE, FACE, |
| | | | FANCF, FANCI, ERCC4, FANCL, |
| | | | FANCM, PALB2, RAD51C, SLX4, |
| | | | UBE2T, FANCB, XRCC9, PHF9, |
| | | | KIAA1596 |
| Fanconi Syndrome Types I | kidneys | | FRTS1, GATM |
| (Childhood onset) and II (Adult | | | |
| Onset) | | | |
| Fragile X syndrome and related | brain | | FMR1, FMR2; FXR1; FXR2; |
| disorders | | | mGLUR5 |
| Fragile XE Mental Retardation | Brain, nervous | | FMR1 |
| (aka Martin Bell syndrome) | system | | |
| Friedreich Ataxia (FRDA) | Brain, nervous | heart | FXN/X25 |
| | system | | |
| Fuchs endothelial corneal | Eye | | TCF4; COL8A2 |
| dystrophy | | | |
| Galactosemia | Carbohydrate | Various—where | GALT, GALK1, and GALE |
| | metabolism | galactose | |
| | disorder | accumulates— | |
| | | liver, brain, eyes | |
| Gastrointestinal Epithelial | | | CISH |
| Cancer, GI cancer | | | |
| Gaucher Disease (Types 1, 2, and | Fat metabolism | Various—liver, | GBA |
| 3, as well as other unusual forms | disorder | spleen, blood, | |
| that may not fit into these types) | | CNS, skeletal | |
| | | system | |
| Griscelli syndrome | | | |
| Glaucoma | eye | | MYOC, TIGR, GLC1A, JOAG, |
| | | | GPOA, OPTN, GLC1E, FIP2, HYPL, |
| | | | NRP, CYP1B1, GLC3A, OPA1, NTG, |
| | | | NPG, CYP1B1, GLC3A, those |
| | | | described in WO2015153780 |
| Glomerulosclerosis | kidney | | CC chemokine ligand 2 |
| Glycogen Storage Diseases | Metabolism | | SLC2A2, GLUT2, G6PC, G6PT, |
| Types I-VI—See also Cori's | Diseases | | G6PT1, GAA, LAMP2, LAMPB, |
| Disease, Pompe Disease, | | | AGL, GDE, GBE1, GYS2, PYGL, |
| McArdle's disease, Hers Disease, | | | PFKM, see also Cori's Disease, |
| and Von Gierke's disease | | | Pompe's Disease, McArdle's disease, |
| | | | Hers Disease, and Von Gierke's |
| | | | disease |
| RBC Glycolytic enzyme | blood | | any mutations in a gene for an enzyme |
| deficiency | | | in the glycolysis pathway including |
| | | | mutations in genes for hexokinases I |
| | | | and II, glucokinase, phosphoglucose |
| | | | isomerase, phosphofructokinase, |
| | | | aldolase Bm triosephosphate |
| | | | isomerease, glyceraldehydee-3- |
| | | | phosphate dehydrogenase, |
| | | | phosphoglycerokinase, |
| | | | phosphoglycerate mutase, enolase I, |
| | | | pyruvate kinase |
| Hartnup disease | Malabsorption | Various—brain, | SLC6A19 |
| | disease | gastrointestinal, | |
| | | skin, | |
| Hearing Loss | ear | | NOX3, Hes5, BDNF, |
| Hemochromatosis (HH) | Iron absorption | Various— | HFE and H63D |
| | regulation | wherever iron | |
| | disease | accumulates, | |
| | | liver, heart, | |
| | | pancreas, joints, | |
| | | pituitary gland | |
| Hemophagocytic | blood | | PRF1, HPLH2, UNC13D, MUNC13- |
| lymphohistiocytosis disorders | | | 4, HPLH3, HLH3, FHL3 |
| Hemorrhagic disorders | blood | | PI, ATT, F5 |
| Hers disease (Glycogen storage | liver | muscle | PYGL |
| disease Type VI) | | | |
| Hereditary angioedema (HAE) | | | kalikrein B1 |
| Hereditary Hemorrhagic | Skin and | | ACVRL1, ENG and SMAD4 |
| Telangiectasia (Osler-Weber- | mucous | | |
| Rendu Syndrome) | membranes | | |
| Hereditary Spherocytosis | blood | | NK1, EPB42, SLC4A1, SPTA1, and |
| | | | SPTB |
| Hereditary Persistence of Fetal | blood | | HBG1, HBG2, BCL11A, promoter |
| Hemoglobin | | | region of HBG 1 and/or 2 (in the |
| | | | CCAAT box) |
| Hemophilia (hemophilia A | blood | | A: FVIII, F8C, HEMA |
| (Classic) a B (aka Christmas | | | B: FVIX, HEMB, FIX |
| disease) and C) | | | C: F9, F11 |
| Hepatic adenoma | liver | | TCF1, HNF1A, MODY3 |
| Hepatic failure, early onset, and | liver | | SCOD1, SCO1 |
| neurologic disorder | | | |
| Hepatic lipase deficiency | liver | | LIPC |
| Hepatoblastoma, cancer and | liver | | CTNNB1, PDGFRL, PDGRL, PRLTS, |
| carcinomas | | | AXINI, AXIN, CTNNB1, TP53, P53, |
| | | | LFS1, IGF2R, MPRI, MET, CASP8, |
| | | | MCH5 |
| Hermansky-Pudlak syndrome | Skin, eyes, | | HPS1, HPS3, HPS4, HPS5, HPS6, |
| | blood, lung, | | HPS7, DTNBP1, BLOC1, BLOC1S2, |
| | kidneys, | | BLOC3 |
| | intestine | | |
| HIV susceptibility or infection | Immune system | | IL10, CSIF, CMKBR2, CCR2, |
| | | | CMKBR5, CCCKR5 (CCR5), those in |
| | | | WO2015148670A1 |
| Holoprosencephaly (HPE) | brain | | ACVRL1, ENG, SMAD4 |
| (Alobar, Semilobar, and Lobar) | | | |
| Homocystinuria | Metabolic | Various— | CBS, MTHFR, MTR, MTRR, and |
| | disease | connective | MMADHC |
| | | tissue, muscles, | |
| | | CNS, | |
| | | cardiovascular | |
| | | system | |
| HPV | | | HPV16 and HPV18 E6/E7 |
| HSV1, HSV2, and related | eye | | HSV1 genes (immediate early and late |
| keratitis | | | HSV-1 genes (UL1, 1.5, 5, 6, 8, 9, 12, |
| | | | 15, 16, 18, 19, 22, 23, 26, 26.5, 27, 28, |
| | | | 29, 30, 31, 32, 33, 34, 35, 36, 37, 38, |
| | | | 42, 48, 49.5, 50, 52, 54, S6, RL2, RS1, |
| | | | those described in WO2015153789, |
| | | | WO2015153791 |
| Hunter's Syndrome (aka | Lysosomal | Various—liver, | DDS |
| Mucopolysaccharidosis type II) | storage disease | spleen, eye, | |
| | | joint, heart, | |
| | | brain, skeletal | |
| Huntington's disease (HD) and | Brain, nervous | | HD, HTT, IT15, PRNP, PRIP, JPH3, |
| HD-like disorders | system | | JP3, HDL2, TBP, SCA17, PRKCE; |
| | | | IGF1; EP300; RCOR1; PRKCZ; |
| | | | HDAC4; and TGM2, and those |
| | | | described in WO2013130824, |
| | | | WO2015089354 |
| Hurler's Syndrome (aka | Lysosomal | Various—liver, | IDUA, α-L-iduronidase |
| mucopolysaccharidosis type I H, | storage disease | spleen, eye, | |
| MPS IH) | | joint, heart, | |
| | | brain, skeletal | |
| Hurler-Scheie syndrome (aka | Lysosomal | Various—liver, | IDUA, α-L-iduronidase |
| mucopolysaccharidosis type I H- | storage disease | spleen, eye, | |
| S, MPS I H-S) | | joint, heart, | |
| | | brain, skeletal | |
| hyaluronidase deficiency (aka | Soft and | | HYAL1 |
| MPS IX) | connective | | |
| | tissues | | |
| Hyper IgM syndrome | Immune system | | CD40L |
| Hyper- tension caused renal | kidney | | Mineral corticoid receptor |
| damage | | | |
| Immunodeficiencies | Immune System | | CD3E, CD3G, AICDA, AID, HIGM2, |
| | | | TNFRSF5, CD40, UNG, DGU, |
| | | | HIGM4, TNFSF5, CD40LG, HIGM1, |
| | | | IGM, FOXP3, IPEX, AIID, XPID, |
| | | | PIDX, TNFRSF14B, TACI |
| Inborn errors of metabolism: | Metabolism | Various organs | See also: Carbohydrate metabolism |
| including urea cycle disorders, | diseases, liver | and cells | disorders (e.g., galactosemia), Amino |
| organic acidemias), fatty acid | | | acid Metabolism disorders (e.g., |
| oxidation defects, amino | | | phenylketonuria), Fatty acid |
| acidopathies, carbohydrate | | | metabolism (e.g., MCAD deficiency), |
| disorders, mitochondrial | | | Urea Cycle disorders (e.g., |
| disorders | | | Citrullinemia), Organic acidemias |
| | | | (e.g., Maple Syrup Urine disease), |
| | | | Mitochondrial disorders (e.g., |
| | | | MELAS), peroxisomal disorders (e.g., |
| | | | Zellweger syndrome) |
| Inflammation | Various | | IL-10; IL-1 (IL-11a; IL-1b); IL-13; IL- |
| | | | 17 (IL-17a (CTLA8); IL-17b; IL-17c; |
| | | | IL-17d; IL-17f); II-23; Cx3cr1; |
| | | | ptpn22; TNFa; NOD2/CARD15 for |
| | | | IBD; IL-6; IL-12 (IL-12a; IL-12b); |
| | | | CTLA4; Cx3cl1 |
| Inflammatory Bowel Diseases | Gastrointestinal | Joints, skin | NOD2, IRGM, LRRK2, ATG5, |
| (e.g., Ulcerative Colitis and | | | ATG16L1, IRGM, GATM, ECM1, |
| Chron's Disease) | | | CDH1, LAMB1, HNF4A, GNA12, |
| | | | IL10, CARD9/15. CCR6, IL2RA, |
| | | | MST1, TNFSF15, REL, STAT3, |
| | | | IL23R, IL12B, FUT2 |
| Interstitial renal fibrosis | kidney | | TGF-B type II receptor |
| Job's Syndrome (aka Hyper IgE | Immune System | | STAT3, DOCK8 |
| Syndrome) | | | |
| Juvenile Retinoschisis | eye | | RS1, XLRS1 |
| Kabuki Syndrome 1 | | | MLL4, KMT2D |
| Kennedy Disease (aka | Muscles, brain, | | SBMA/SMAX1/AR |
| Spinobulbar Muscular Atrophy) | nervous system | | |
| Klinefelter syndrome | Various- | | Extra X chromosome in males |
| | particularly | | |
| | those involved | | |
| | in development | | |
| | of male | | |
| | characteristics | | |
| Lafora Disease | Brain, CNS | | EMP2A and EMP2B |
| Leber Congenital Amaurosis | eye | | CRB1, RP12, CORD2, CRD, CRX, |
| | | | IMPDH1, OTX2, AIPLI, CABP4, |
| | | | CCT2, CEP290, CLUAP1, CRB1, |
| | | | CRX, DTHD1, GDF6, GUCY2D, |
| | | | IFT140, IQCB1, KCNJ13, LCA5, |
| | | | LRAT, NMNAT1, PRPH2, RD3, |
| | | | RDH12, RPE65, RP20, RPGRIP1, |
| | | | SPATA7, TULP1, LCA1, LCA4, |
| | | | GUC2D, CORD6, LCA3, |
| Lesch-Nyhan Syndrome | Metabolism | Various—joints, | HPRT1 |
| | disease | cognitive, brain, | |
| | | nervous system | |
| Leukocyte deficiencies and | blood | | ITGB2, CD18, LCAMB, LAD, |
| disorders | | | EIF2B1, EIF2BA, EIF2B2, EIF2B3, |
| | | | EIF2B5, LVWM, CACH, CLE, |
| | | | EIF2B4 |
| Leukemia | Blood | | TAL1, TCL5, SCL, TAL2, FLT3, |
| | | | NBS1, NBS, ZNFN1A1, IK1, LYF1, |
| | | | HOXD4, HOX4B, BCR, CML, PHL, |
| | | | ALL, ARNT, KRAS2, RASK2, |
| | | | GMPS, AF10, ARHGEF12, LARG, |
| | | | KIAA0382, CALM, CLTH, CEBPA, |
| | | | CEBP, CHIC2, BTL, FLT3, KIT, |
| | | | PBT, LPP, NPM1, NUP214, D9S46E, |
| | | | CAN, CAIN, RUNX1, CBFA2, |
| | | | AML1, WHSCIL1, NSD3, FLT3, |
| | | | AF1Q, NPM1, NUMA1, ZNF145, |
| | | | PLZF, PML, MYL, STAT5B, AF10, |
| | | | CALM, CLTH, ARL11, ARLTS1, |
| | | | P2RX7, P2X7, BCR, CML, PHL, |
| | | | ALL, GRAF, NF1, VRNF, WSS, |
| | | | NFNS, PTPN11, PTP2C, SHP2, NS1, |
| | | | BCL2, CCND1, PRAD1, BCL1, |
| | | | TCRA, GATA1, GF1, ERYF1, NFE1, |
| | | | ABL1, NQO1, DIA4, NMOR1, |
| | | | NUP214, D9S46E, CAN, CAIN |
| Limb-girdle muscular dystrophy | muscle | | LGMD |
| diseases | | | |
| Lowe syndrome | brain, eyes, | | OCRL |
| | kidneys | | |
| Lupus glomerulo- nephritis | kidney | | MAPK1 |
| Machado- | Brain, CNS, | | ATX3 |
| Joseph's Disease (also known as | muscle | | |
| Spinocerebellar ataxia Type 3) | | | |
| Macular degeneration | eye | | ABC4, CBC1, CHMI, APOE, |
| | | | C1QTNF5, C2, C3, CCL2, CCR2, |
| | | | CD36, CFB, CFH, CFHR1, CFHR3, |
| | | | CNGB3, CP, CRP, CST3, CTSD, |
| | | | CX3CR1, ELOVL4, ERCC6, FBLN5, |
| | | | FBLN6, FSCN2, HMCN1, HTRA1, |
| | | | IL6, IL8, PLEKHA1, PROM1, |
| | | | PRPH2, RPGR, SERPING1, TCOF1, |
| | | | TIMP3, TLR3 |
| Macular Dystrophy | eye | | BEST1, C1QTNF5, CTNNA1, |
| | | | EFEMP1, ELOVL4, FSCN2, |
| | | | GUCA1B, HMCN1, IMPG1, OTX2, |
| | | | PRDM13, PROM1, PRPH2, RP1L1, |
| | | | TIMP3, ABCA4, CFH, DRAM2, |
| | | | IMG1, MFSD8, ADMD, STGD2, |
| | | | STGD3, RDS, RP7, PRPH, AVMD, |
| | | | AOFMD, VMD2 |
| Malattia Leventinese | eye | | EFEMP1, FBLN3 |
| Maple Syrup Urine Disease | Metabolism | | BCKDHA, BCKDHB, and DBT |
| | disease | | |
| Marfan syndrome | Connective | Musculoskeletal | FBN1 |
| | tissue | | |
| Maroteaux-Lamy Syndrome (aka | Musculoskeletal | Liver, spleen | ARSB |
| MPS VI) | system, nervous | | |
| | system | | |
| McArdle's Disease (Glycogen | Glycogen | muscle | PYGM |
| Storage Disease Type V) | storage disease | | |
| Medullary cystic kidney disease | kidney | | UMOD, HNFJ, FJHN, MCKD2, |
| | | | ADMCKD2 |
| Metachromatic leukodystrophy | Lysosomal | Nervous system | ARSA |
| | storage disease | | |
| Methylmalonic acidemia (MMA) | Metabolism | | MMAA, MMAB, MUT, MMACHC, |
| | disease | | MMADHC, LMBRD1 |
| Morquio Syndrome (aka MPS IV | Connective | heart | GALNS |
| A and B) | tissue, skin, | | |
| | bone, eyes | | |
| Mucopolysaccharidosis diseases | Lysosomal | | See also Hurler/Scheie syndrome, |
| (Types I H/S, I H, II, III A B and | storage disease | | Hurler disease, Sanfilippo syndrome, |
| C, I S, IVA and B, IX, VII, and | - affects various | | Scheie syndrome, Morquio syndrome, |
| VI) | organs/tissues | | hyaluronidase deficiency, Sly |
| | | | syndrome, and Maroteaux-Lamy |
| | | | syndrome |
| Muscular Atrophy | muscle | | VAPB, VAPC, ALS8, SMN1, SMA1, |
| | | | SMA2, SMA3, SMA4, BSCL2, |
| | | | SPG17, GARS, SMAD1, CMT2D, |
| | | | HEXB, IGHMBP2, SMUBP2, |
| | | | CATF1, SMARD1 |
| Muscular dystrophy | muscle | | FKRP, MDC1C, LGMD2I, LAMA2, |
| | | | LAMM, LARGE, KIAA0609, |
| | | | MDC1D, FCMD, TTID, MYOT, |
| | | | CAPN3, CANP3, DYSF, LGMD2B, |
| | | | SGCG, LGMD2C, DMDA1, SCG3, |
| | | | SGCA, ADL, DAG2, LGMD2D, |
| | | | DMDA2, SGCB, LGMD2E, SGCD, |
| | | | SGD, LGMD2F, CMD1L, TCAP, |
| | | | LGMD2G, CMD1N, TRIM32, HT2A, |
| | | | LGMD2H, FKRP, MDC1C, LGMD2I, |
| | | | TTN, CMD1G, TMD, LGMD2J, |
| | | | POMT1, CAV3, LGMD1C, SEPN1, |
| | | | SELN, RSMD1, PLEC1, PLTN, EBS1 |
| Myotonic dystrophy (Type 1 and | Muscles | Eyes, heart, | CNBP (Type 2) and DMPK (Type 1) |
| Type 2) | | endocrine | |
| Neoplasia | | | PTEN; ATM; ATR; EGFR; ERBB2; |
| | | | ERBB3; ERBB4; Notch1; Notch2; |
| | | | Notch3; Notch4; AKT; AKT2; AKT3; |
| | | | HIF; HIF1a; HIF3a; Met; HRG; Bcl2; |
| | | | PPAR alpha; PPAR gamma; WT1 |
| | | | (Wilms Tumor); FGF Receptor Family |
| | | | members (5 members: 1, 2, 3, 4, 5); |
| | | | CDKN2a; APC; RB (retinoblastoma); |
| | | | MEN1; VHL; BRCA1; BRCA2; AR |
| | | | (Androgen Receptor); TSG101; IGF; |
| | | | IGF Receptor; Igf1 (4 variants); Igf2 (3 |
| | | | variants); Igf 1 Receptor; Igf 2 |
| | | | Receptor; Bax; Bcl2; caspases family |
| | | | (9 members: 1, 2, 3, 4, 6, 7, 8, 9, 12); |
| | | | Kras; Apc |
| Neurofibromatosis (NF) (NF1, | brain, spinal | | NF1, NF2 |
| formerly Recklinghausen's NF, | cord, nerves, | | |
| and NF2) | and skin | | |
| Niemann-Pick Lipidosis (Types | Lysosomal | Various—where | Types A and B: SMPD1; Type C: |
| A, B, and C) | Storage Disease | sphingomyelin | NPC1 or NPC2 |
| | | accumulates, | |
| | | particularly | |
| | | spleen, liver, | |
| | | blood, CNS | |
| Noonan Syndrome | Various - | | PTPN11, SOS1, RAF1 and KRAS |
| | musculoskeletal, | | |
| | heart, eyes, | | |
| | reproductive | | |
| | organs, blood | | |
| Norrie Disease or X-linked | eye | | NDP |
| Familial Exudative | | | |
| Vitreoretinopathy | | | |
| North Carolina Macular | eye | | MCDR1 |
| Dystrophy | | | |
| Osteogenesis imperfecta (OI) | bones, | | COL1A1, COL1A2, CRTAP, P3H |
| (Types I, II, III, IV, V, VI, VII) | musculoskeletal | | |
| Osteopetrosis | bones | | LRP5, BMND1, LRP7, LR3, OPPG, |
| | | | VBCH2, CLCN7, CLC7, OPTA2, |
| | | | OSTM1, GL, TCIRG1, TIRC7, |
| | | | OC116, OPTB1 |
| Patau's Syndrome | Brain, heart, | | Additional copy of chromosome 13 |
| (Trisomy 13) | skeletal system | | |
| Parkinson's disease (PD) | Brain, nervous | | SNCA (PARK1), UCHL1 (PARK 5), |
| | system | | and LRRK2 (PARK8), (PARK3), |
| | | | PARK2, PARK4, PARK7 (PARK7), |
| | | | PINK1 (PARK6); x-Synuclein, DJ-1, |
| | | | Parkin, NR4A2, NURR1, NOT, |
| | | | TINUR, SNCAIP, TBP, SCA17, |
| | | | NCAP, PRKN, PDJ, DBH, NDUFV2 |
| Pattern Dystrophy of the RPE | eye | | RDS/peripherin |
| Phenylketonuria (PKU) | Metabolism | Various due to | PAH, PKU1, QDPR, DHPR, PTS |
| | disorder | build-up of | |
| | | phenylalanine, | |
| | | phenyl ketones | |
| | | in tissues and | |
| | | CNS | |
| Polycystic kidney and hepatic | Kidney, liver | | FCYT, PKHD1, ARPKD, PKD1, |
| disease | | | PKD2, PKD4, PKDTS, PRKCSH, |
| | | | G19P1, PCLD, SEC63 |
| Pompe Disease | Glycogen | Various—heart, | GAA |
| | storage disease | liver, spleen | |
| Porphyria (actually refers to a | Various— | | ALAD, ALAS2, CPOX, FECH, |
| group of different diseases all | wherever heme | | HMBS, PPOX, UROD, or UROS |
| having a specific heme | precursors | | |
| production process abnormality) | accumulate | | |
| posterior polymorphous corneal | eyes | | TCF4; COL8A2 |
| dystrophy | | | |
| Primary Hyperoxaluria (e.g., type | Various—eyes, | | LDHA (lactate dehydrogenase A) and |
| 1) | heart, kidneys, | | hydroxyacid oxidase 1 (HAO1) |
| | skeletal system | | |
| Primary Open Angle Glaucoma | eyes | | MYOC |
| (POAG) | | | |
| Primary sclerosing cholangitis | Liver, | | TCF4; COL8A2 |
| | gallbladder | | |
| Progeria (also called Hutchinson- | All | | LMNA |
| Gilford progeria syndrome) | | | |
| Prader-Willi Syndrome | Musculoskeletal | | Deletion of region of short arm of |
| | system, brain, | | chromosome 15, including UBE3A |
| | reproductive | | |
| | and endocrine | | |
| | system | | |
| Prostate Cancer | prostate | | HOXB13, MSMB, GPRC6A, TP53 |
| Pyruvate Dehydrogenase | Brain, nervous | | PDHA1 |
| Deficiency | system | | |
| Kidney/Renal carcinoma | kidney | | RLIP76, VEGF |
| Rett Syndrome | Brain | | MECP2, RTT, PPMX, MRX16, |
| | | | MRX79, CDKL5, STK9, MECP2, |
| | | | RTT, PPMX, MRX16, MRX79, x- |
| | | | Synuclein, DJ-1 |
| Retinitis pigmentosa (RP) | eye | | ADIPOR1, ABCA4, AGBL5, |
| | | | ARHGEF18, ARL2BP, ARL3, ARL6, |
| | | | BEST1, BBS1, BBS2, C2ORF71, |
| | | | C8ORF37, CA4, CERKL, CLRN1, |
| | | | CNGA1, CMGB1, CRB1, CRX, |
| | | | CYP4V2, DHDDS, DHX38, EMC1, |
| | | | EYS, FAM161A, FSCN2, GPR125, |
| | | | GUCA1B, HK1, HPRPF3, HGSNAT, |
| | | | IDH3B, IMPDH1, IMPG2, IFT140, |
| | | | IFT172, KLHL7, KIAA1549, KIZ, |
| | | | LRAT, MAK, MERTK, MVK, NEK2, |
| | | | NUROD1, NR2E3, NRL, OFD1, |
| | | | PDE6A, PDE6B, PDE6G, POMGNT1, |
| | | | PRCD, PROM1, PRPF3, PRPF4, |
| | | | PRPF6, PRPF8, PRPF31, PRPH2, |
| | | | RPB3, RDH12, REEP6, RP39, RGR, |
| | | | RHO, RLBP1, ROM1, RP1, RP1L1, |
| | | | RPY, RP2, RP9, RPE65, RPGR, |
| | | | SAMD11, SAG, SEMA4A, SLC7A14, |
| | | | SNRNP200, SPP2, SPATA7, TRNT1, |
| | | | TOPORS, TTC8, TULP1, USH2A, |
| | | | ZFN408, ZNF513, see also |
| | | | 20120204282 |
| Scheie syndrome (also known as | Various—liver, | | IDUA, α-L-iduronidase |
| mucopolysaccharidosis type I | spleen, eye, | | |
| S(MPS I-S)) | joint, heart, | | |
| | brain, skeletal | | |
| Schizophrenia | Brain | | Neuregulin1 (Nrg1); Erb4 (receptor for |
| | | | Neuregulin); Complexin1 (Cplx1); |
| | | | Tph1 Tryptophan hydroxylase; Tph2 |
| | | | Tryptophan hydroxylase 2; Neurexin |
| | | | 1; GSK3; GSK3a; GSK3b; 5-HTT |
| | | | (Slc6a4); COMT; DRD (Drd1a); |
| | | | SLC6A3; DAOA; DTNBP1; Dao |
| | | | (Dao1); TCF4; COL8A2 |
| Secretase Related Disorders | Various | | APH-1 (alpha and beta); PSEN1; |
| | | | NCSTN; PEN-2; Nos1, Parp1, Nat1, |
| | | | Nat2, CTSB, APP, APH1B, PSEN2, |
| | | | PSENEN, BACE1, ITM2B, CTSD, |
| | | | NOTCH1, TNF, INS, DYT10, |
| | | | ADAM17, APOE, ACE, STN, TP53, |
| | | | IL6, NGFR, IL1B, ACHE, CTNNB1, |
| | | | IGF1, IFNG, NRG1, CASP3, MAPK1, |
| | | | CDH1, APBB1, HMGCR, CREB1, |
| | | | PTGS2, HES1, CAT, TGFB1, ENO2, |
| | | | ERBB4, TRAPPC10, MAOB, NGF, |
| | | | MMP12, JAG1, CD40LG, PPARG, |
| | | | FGF2, LRP1, NOTCH4, MAPK8, |
| | | | PREP, NOTCH3, PRNP, CTSG, EGF, |
| | | | REN, CD44, SELP, GHR, ADCYAP1, |
| | | | INSR, GFAP, MMP3, MAPK10, SP1, |
| | | | MYC, CTSE, PPARA, JUN, TIMP1, |
| | | | IL5, IL1A, MMP9, HTR4, HSPG2, |
| | | | KRAS, CYCS, SMG1, IL1R1, |
| | | | PROK1, MAPK3, NTRK1, IL13, |
| | | | MME, TKT, CXCR2, CHRM1, |
| | | | ATXN1,PAWR, NOTCJ2, M6PR, |
| | | | CYP46A1, CSNK1D, MAPK14, |
| | | | PRG2, PRKCA, L1 CAM, CD40, |
| | | | NR112, JAG2, CTNND1, CMA1, |
| | | | SORT1, DLK1, THEM4, JUP, CD46, |
| | | | CCL11, CAV3, RNASE3, HSPA8, |
| | | | CASP9, CYP3A4, CCR3, TFAP2A, |
| | | | SCP2, CDK4, JOFIA, TCF7L2, |
| | | | B3GALTL, MDM2, RELA, CASP7, |
| | | | IDE, FANP4, CASK, ADCYAP1R1, |
| | | | ATF4, PDGFA, C21ORF33, SCG5, |
| | | | RMF123, NKFB1, ERBB2, CAV1, |
| | | | MMP7, TGFA, RXRA, STX1A, |
| | | | PSMC4, P2RY2, TNFRSF21, DLG1, |
| | | | NUMBL, SPN, PLSCR1, UBQLN2, |
| | | | UBQLN1, PCSK7, SPON1, SILV, |
| | | | QPCT, HESS, GCC1 |
| Selective IgA Deficiency | Immune system | | Type 1: MSH5; Type 2: TNFRSF13B |
| Severe Combined | Immune system | | JAK3, JAKL, DCLREIC, ARTEMIS, |
| Immunodeficiency (SCID) and | | | SCIDA, RAG1, RAG2, ADA, PTPRC, |
| SCID-X1, and ADA-SCID | | | CD45, LCA, IL7R, CD3D, T3D, |
| | | | IL2RG, SCIDX1, SCIDX, IMD4, |
| | | | those identified in US Pat. App. Pub. |
| | | | 20110225664, 20110091441, |
| | | | 20100229252, 20090271881 and |
| | | | 20090222937; |
| Sickle cell disease | blood | | HBB, BCL11A, BCL11Ae, cis- |
| | | | regulatory elements of the B-globin |
| | | | locus, HBG 1/2 promoter, HBG distal |
| | | | CCAAT box region between −92 and |
| | | | −130 of the HBG Transcription Start |
| | | | Site, those described in |
| | | | WO2015148863, WO 2013/126794, |
| | | | US Pat. Pub. 20110182867 |
| Sly Syndrome (aka MPS VII) | | | GUSB |
| Spinocerebellar Ataxias (SCA | | | ATXN1, ATXN2, ATX3 |
| types 1, 2, 3, 6, 7, 8, 12 and 17) | | | |
| Sorsby Fundus Dystrophy | eye | | TIMP3 |
| Stargardt disease | eye | | ABCR, ELOVL4, ABCA4, PROM1 |
| Tay-Sachs Disease | Lysosomal | Various - CNS, | HEX-A |
| | Storage disease | brain, eye | |
| Thalassemia (Alpha, Beta, Delta) | blood | | HBA1, HBA2 (Alpha), HBB (Beta), |
| | | | HBB and HBD (delta), LCRB, |
| | | | BCL11A, BCL11Ae, cis-regulatory |
| | | | elements of the B-globin locus, HBG |
| | | | 1/2 promoter, those described in |
| | | | WO2015148860, US Pat. Pub. |
| | | | 20110182867, 2015/148860 |
| Thymic Aplasia (DiGeorge | Immune system, | | deletion of 30 to 40 genes in the |
| Syndrome;22q11.2 deletion | thymus | | middle of chromosome 22 at |
| syndrome) | | | a location known as 22q11.2, including |
| | | | TBX1, DGCR8 |
| Transthyretin amyloidosis | liver | | TTR (transthyretin) |
| (ATTR) | | | |
| trimethylaminuria | Metabolism | | FMO3 |
| | disease | | |
| Trinucleotide Repeat Disorders | Various | | HTT; SBMA/SMAX1/AR; FXN/X25 |
| (generally) | | | ATX3; ATXN1; ATXN2; DMPK; |
| | | | Atrophin-1 and Atn1 (DRPLA Dx); |
| | | | CBP (Creb-BP—global instability); |
| | | | VLDLR; Atxn7; Atxn10; FEN1, |
| | | | TNRC6A, PABPN1, JPH3, MED 15, |
| | | | ATXN1, ATXN3, TBP, CACNA1A, |
| | | | ATXN80S, PPP2R2B, ATXN7, |
| | | | TNRC6B, TNRC6C, CELF3, |
| | | | MAB21L1, MSH2, TMEM185A, |
| | | | SIX5, CNPY3, RAXE, GNB2, RPL14, |
| | | | ATXN8, ISR, TTR, EP400, GIGYF2, |
| | | | OGG1, STC1, CNDP1, C10ORF2, |
| | | | MAML3, DKC1, PAXIP1, CASK, |
| | | | MAPT, SP1, POLG, AFF2, THBS1, |
| | | | TP53, ESR1, CGGBP1, ABT1, KLK3, |
| | | | PRNP, JUN, KCNN3, BAX, FRAXA, |
| | | | KBTBD10, MBNL1, RAD51, |
| | | | NCOA3, ERDA1, TSC1, COMP, |
| | | | GGLC, RRAD, MSH3, DRD2, CD44, |
| | | | CTCF, CCND1, CLSPN, MEF2A, |
| | | | PTPRU, GAPDH, TRIM22, WT1, |
| | | | AHR, GPX1, TPMT, NDP, ARX, |
| | | | TYR, EGR1, UNG, NUMBL, FABP2, |
| | | | EN2, CRYGC, SRP14, CRYGB, |
| | | | PDCD1, HOXA1, ATXN2L, PMS2, |
| | | | GLA, CBL, FTH1, IL12RB2, OTX2, |
| | | | HOXA5, POLG2, DLX2, AHRR, |
| | | | MANF, RMEM158, see also |
| | | | 20110016540 |
| Turner's Syndrome (XO) | Various— | | Monosomy X |
| | reproductive | | |
| | organs, and sex | | |
| | characteristics, | | |
| | vasculature | | |
| Tuberous Sclerosis | CNS, heart, | | TSC1, TSC2 |
| | kidneys | | |
| Usher syndrome (Types I, II, and | Ears, eyes | | ABHD12, CDH23, CIB2, CLRN1, |
| III) | | | DFNB31, GPR98, HARS, MYO7A, |
| | | | PCDH15, USH1C, USH1G, USH2A, |
| | | | USH11A, those described in |
| | | | WO2015134812A1 |
| Velocardiofacial syndrome (aka | Various— | | Many genes are deleted, COM, TBX1, |
| 22q11.2 deletion syndrome, | skeletal, heart, | | and other are associated with |
| DiGeorge syndrome, conotruncal | kidney, immune | | symptoms |
| anomaly face syndrome (CTAF), | system, brain | | |
| autosomal dominant Opitz G/BB | | | |
| syndrome or Cayler cardio-facial | | | |
| syndrome) | | | |
| Von Gierke's Disease (Glycogen | Glycogen | Various—liver, | G6PC and SLC37A4 |
| Storage Disease type I) | Storage disease | kidney | |
| Von Hippel-Lindau Syndrome | Various—cell | CNS, Kidney, | VHL |
| | growth | Eye, visceral | |
| | regulation | organs | |
| | disorder | | |
| Von Willebrand Disease (Types | blood | | VWF |
| I, II and III) | | | |
| Wilson Disease | Various— | Liver, brains, | ATP7B |
| | Copper Storage | eyes, other | |
| | Disease | tissues where | |
| | | copper builds up | |
| Wiskott-Aldrich Syndrome | Immune System | | WAS |
| Xeroderma Pigmentosum | Skin | Nervous system | POLH |
| XXX Syndrome | Endocrine, brain | | X chromosome trisomy |

TABLE 3
Exemplary Genes controlling Cellular Functions

| CELLULAR FUNCTION | GENES |
|---|---|
| PI3K/AKT Signaling | PRKCE; ITGAM; ITGA5; IRAK1; PRKAA2; EIF2AK2; |
| | PTEN; EIF4E; PRKCZ; GRK6; MAPK1; TSC1; PLK1; |
| | AKT2; IKBKB; PIK3CA; CDK8; CDKNIB; NFKB2; BCL2; |
| | PIK3CB; PPP2R1A; MAPK8; BCL2L1; MAPK3; TSC2; |
| | ITGA1; KRAS; EIF4EBP1; RELA; PRKCD; NOS3; |
| | PRKAA1; MAPK9; CDK2; PPP2CA; PIM1; ITGB7; |
| | YWHAZ; ILK; TP53; RAF1; IKBKG; RELB; DYRK1A; |
| | CDKN1A; ITGB1; MAP2K2; JAK1; AKT1; JAK2; PIK3R1; |
| | CHUK; PDPK1; PPP2R5C; CTNNB1; MAP2K1; NFKB1; |
| | PAK3; ITGB3; CCND1; GSK3A; FRAP1; SFN; ITGA2; |
| | TTK; CSNK1A1; BRAF; GSK3B; AKT3; FOXO1; SGK; |
| | HSP90AA1; RPS6KB1 |
| ERK/MAPK Signaling | PRKCE; ITGAM; ITGA5; HSPB1; IRAK1; PRKAA2; |
| | EIF2AK2; RAC1; RAP1A; TLN1; EIF4E; ELK1; GRK6; |
| | MAPK1; RAC2; PLK1; AKT2; PIK3CA; CDK8; CREB1; |
| | PRKCI; PTK2; FOS; RPS6KA4; PIK3CB; PPP2R1A; |
| | PIK3C3; MAPK8; MAPK3; ITGA1; ETS1; KRAS; MYCN; |
| | EIF4EBP1; PPARG; PRKCD; PRKAA1; MAPK9; SRC; |
| | CDK2; PPP2CA; PIM1; PIK3C2A; ITGB7; YWHAZ; |
| | PPP1CC; KSR1; PXN; RAF1; FYN; DYRKIA; ITGB1; |
| | MAP2K2; PAK4; PIK3R1; STAT3; PPP2R5C; MAP2K1; |
| | PAK3; ITGB3; ESR1; ITGA2; MYC; TTK; CSNK1A1; |
| | CRKL; BRAF; ATF4; PRKCA; SRF; STATI; SGK |
| Glucocorticoid Receptor | RAC1; TAF4B; EP300; SMAD2; TRAF6; PCAF; ELK1; |
| Signaling | MAPK1; SMAD3; AKT2; IKBKB; NCOR2; UBE2I; |
| | PIK3CA; CREB1; FOS; HSPA5; NFKB2; BCL2; |
| | MAP3K14; STAT5B; PIK3CB; PIK3C3; MAPK8; BCL2L1; |
| | MAPK3; TSC22D3; MAPK10; NRIP1; KRAS; MAPK13; |
| | RELA; STAT5A; MAPK9; NOS2A; PBX1; NR3C1; |
| | PIK3C2A; CDKN1C; TRAF2; SERPINE1; NCOA3; |
| | MAPK14; TNF; RAF1; IKBKG; MAP3K7; CREBBP; |
| | CDKNIA; MAP2K2; JAK1; IL8; NCOA2; AKT1; JAK2; |
| | PIK3R1; CHUK; STAT3; MAP2K1; NFKB1; TGFBR1; |
| | ESR1; SMAD4; CEBPB; JUN; AR; AKT3; CCL2; MMP1; |
| | STAT1; IL6; HSP90AA1 |
| Axonal Guidance | PRKCE; ITGAM; ROCK1; ITGA5; CXCR4; ADAM12; |
| Signaling | IGF1; RAC1; RAP1A; EIF4E; PRKCZ; NRP1; NTRK2; |
| | ARHGEF7; SMO; ROCK2; MAPK1; PGF; RAC2; |
| | PTPN11; GNAS; AKT2; PIK3CA; ERBB2; PRKCI; PTK2; |
| | CFL1; GNAQ; PIK3CB; CXCL12; PIK3C3; WNT11; |
| | PRKD1; GNB2L1; ABL1; MAPK3; ITGA1; KRAS; RHOA; |
| | PRKCD; PIK3C2A; ITGB7; GLI2; PXN; VASP; RAF1; |
| | FYN; ITGB1; MAP2K2; PAK4; ADAM17; AKT1; PIK3R1; |
| | GLI1; WNT5A; ADAM10; MAP2K1; PAK3; ITGB3; |
| | CDC42; VEGFA; ITGA2; EPHA8; CRKL; RND1; GSK3B; |
| | AKT3; PRKCA |
| Ephrin Receptor | PRKCE; ITGAM; ROCK1; ITGA5; CXCR4; IRAK1; |
| Signaling | PRKAA2; EIF2AK2; RAC1; RAPIA; GRK6; ROCK2; |
| | MAPK1; PGF; RAC2; PTPN11; GNAS; PLK1; AKT2; |
| | DOK1; CDK8; CREB1; PTK2; CFL1; GNAQ; MAP3K14; |
| | CXCL12; MAPK8; GNB2L1; ABL1; MAPK3; ITGA1; |
| | KRAS; RHOA; PRKCD; PRKAA1; MAPK9; SRC; CDK2; |
| | PIM1; ITGB7; PXN; RAF1; FYN; DYRKIA; ITGB1; |
| | MAP2K2; PAK4; AKT1; JAK2; STAT3; ADAM10; |
| | MAP2K1; PAK3; ITGB3; CDC42; VEGFA; ITGA2; |
| | EPHA8; TTK; CSNK1A1; CRKL; BRAF; PTPN13; ATF4; |
| | AKT3; SGK |
| Actin Cytoskeleton | ACTN4; PRKCE; ITGAM; ROCK1; ITGA5; IRAK1; |
| Signaling | PRKAA2; EIF2AK2; RAC1; INS; ARHGEF7; GRK6; |
| | ROCK2; MAPK1; RAC2; PLK1; AKT2; PIK3CA; CDK8; |
| | PTK2; CFL1; PIK3CB; MYH9; DIAPH1; PIK3C3; MAPK8; |
| | F2R; MAPK3; SLC9A1; ITGA1; KRAS; RHOA; PRKCD; |
| | PRKAA1; MAPK9; CDK2; PIM1; PIK3C2A; ITGB7; |
| | PPP1CC; PXN; VIL2; RAF1; GSN; DYRK1A; ITGB1; |
| | MAP2K2; PAK4; PIP5K1A; PIK3R1; MAP2K1; PAK3; |
| | ITGB3; CDC42; APC; ITGA2; TTK; CSNK1A1; CRKL; |
| | BRAF; VAV3; SGK |
| Huntington's Disease | PRKCE; IGF1; EP300; RCOR1; PRKCZ; HDAC4; TGM2; |
| Signaling | MAPK1; CAPNS1; AKT2; EGFR; NCOR2; SP1; CAPN2; |
| | PIK3CA; HDAC5; CREB1; PRKCI; HSPA5; REST; |
| | GNAQ; PIK3CB; PIK3C3; MAPK8; IGF1R; PRKD1; |
| | GNB2L1; BCL2L1; CAPN1; MAPK3; CASP8; HDAC2; |
| | HDAC7A; PRKCD; HDAC11; MAPK9; HDAC9; PIK3C2A; |
| | HDAC3; TP53; CASP9; CREBBP; AKT1; PIK3R1; |
| | PDPK1; CASP1; APAF1; FRAP1; CASP2; JUN; BAX; |
| | ATF4; AKT3; PRKCA; CLTC; SGK; HDAC6; CASP3 |
| Apoptosis Signaling | PRKCE; ROCK1; BID; IRAK1; PRKAA2; EIF2AK2; BAK1; |
| | BIRC4; GRK6; MAPK1; CAPNS1; PLK1; AKT2; IKBKB; |
| | CAPN2; CDK8; FAS; NFKB2; BCL2; MAP3K14; MAPK8; |
| | BCL2L1; CAPN1; MAPK3; CASP8; KRAS; RELA; |
| | PRKCD; PRKAA1; MAPK9; CDK2; PIM1; TP53; TNF; |
| | RAF1; IKBKG; RELB; CASP9; DYRK1A; MAP2K2; |
| | CHUK; APAF1; MAP2K1; NFKB1; PAK3; LMNA; CASP2; |
| | BIRC2; TTK; CSNK1A1; BRAF; BAX; PRKCA; SGK; |
| | CASP3; BIRC3; PARP1 |
| B Cell Receptor Signaling | RAC1; PTEN; LYN; ELK1; MAPK1; RAC2; PTPN11; |
| | AKT2; IKBKB; PIK3CA; CREB1; SYK; NFKB2; CAMK2A; |
| | MAP3K14; PIK3CB; PIK3C3; MAPK8; BCL2L1; ABL1; |
| | MAPK3; ETS1; KRAS; MAPK13; RELA; PTPN6; MAPK9; |
| | EGR1; PIK3C2A; BTK; MAPK14; RAF1; IKBKG; RELB; |
| | MAP3K7; MAP2K2; AKT1; PIK3R1; CHUK; MAP2K1; |
| | NFKB1; CDC42; GSK3A; FRAP1; BCL6; BCL10; JUN; |
| | GSK3B; ATF4; AKT3; VAV3; RPS6KB1 |
| Leukocyte Extravasation | ACTN4; CD44; PRKCE; ITGAM; ROCK1; CXCR4; CYBA; |
| Signaling | RAC1; RAP1A; PRKCZ; ROCK2; RAC2; PTPN11; |
| | MMP14; PIK3CA; PRKCI; PTK2; PIK3CB; CXCL12; |
| | PIK3C3; MAPK8; PRKD1; ABL1; MAPK10; CYBB; |
| | MAPK13; RHOA; PRKCD; MAPK9; SRC; PIK3C2A; BTK; |
| | MAPK14; NOX1; PXN; VIL2; VASP; ITGB1; MAP2K2; |
| | CTNND1; PIK3R1; CTNNB1; CLDN1; CDC42; F11R; ITK; |
| | CRKL; VAV3; CTTN; PRKCA; MMP1; MMP9 |
| Integrin Signaling | ACTN4; ITGAM; ROCK1; ITGA5; RAC1; PTEN; RAP1A; |
| | TLN1; ARHGEF7; MAPK1; RAC2; CAPNS1; AKT2; |
| | CAPN2; PIK3CA; PTK2; PIK3CB; PIK3C3; MAPK8; |
| | CAV1; CAPN1; ABL1; MAPK3; ITGA1; KRAS; RHOA; |
| | SRC; PIK3C2A; ITGB7; PPP1CC; ILK; PXN; VASP; |
| | RAF1; FYN; ITGB1; MAP2K2; PAK4; AKT1; PIK3R1; |
| | TNK2; MAP2K1; PAK3; ITGB3; CDC42; RND3; ITGA2; |
| | CRKL; BRAF; GSK3B; AKT3 |
| Acute Phase Response | IRAK1; SOD2; MYD88; TRAF6; ELK1; MAPK1; PTPN11; |
| Signaling | AKT2; IKBKB; PIK3CA; FOS; NFKB2; MAP3K14; |
| | PIK3CB; MAPK8; RIPK1; MAPK3; IL6ST; KRAS; |
| | MAPK13; IL6R; RELA; SOCS1; MAPK9; FTL; NR3C1; |
| | TRAF2; SERPINE1; MAPK14; TNF; RAF1; PDK1; |
| | IKBKG; RELB; MAP3K7; MAP2K2; AKT1; JAK2; PIK3R1; |
| | CHUK; STAT3; MAP2K1; NFKB1; FRAP1; CEBPB; JUN; |
| | AKT3; ILIR1; IL6 |
| PTEN Signaling | ITGAM; ITGA5; RAC1; PTEN; PRKCZ; BCL2L11; |
| | MAPK1; RAC2; AKT2; EGFR; IKBKB; CBL; PIK3CA; |
| | CDKN1B; PTK2; NFKB2; BCL2; PIK3CB; BCL2L1; |
| | MAPK3; ITGA1; KRAS; ITGB7; ILK; PDGFRB; INSR; |
| | RAF1; IKBKG; CASP9; CDKNIA; ITGB1; MAP2K2; |
| | AKT1; PIK3R1; CHUK; PDGFRA; PDPK1; MAP2K1; |
| | NFKB1; ITGB3; CDC42; CCND1; GSK3A; ITGA2; |
| | GSK3B; AKT3; FOXO1; CASP3; RPS6KB1 |
| p53 Signaling | PTEN; EP300; BBC3; PCAF; FASN; BRCA1; GADD45A; |
| | BIRC5; AKT2; PIK3CA; CHEK1; TP53INP1; BCL2; |
| | PIK3CB; PIK3C3; MAPK8; THBS1; ATR; BCL2L1; E2F1; |
| | PMAIP1; CHEK2; TNFRSF10B; TP73; RB1; HDAC9; |
| | CDK2; PIK3C2A; MAPK14; TP53; LRDD; CDKN1A; |
| | HIPK2; AKT1; PIK3R1; RRM2B; APAF1; CTNNB1; |
| | SIRT1; CCND1; PRKDC; ATM; SFN; CDKN2A; JUN; |
| | SNAI2; GSK3B; BAX; AKT3 |
| Aryl Hydrocarbon | HSPB1; EP300; FASN; TGM2; RXRA; MAPK1; NQO1; |
| Receptor Signaling | NCOR2; SP1; ARNT; CDKN1B; FOS; CHEK1; |
| | SMARCA4; NFKB2; MAPK8; ALDHIA1; ATR; E2F1; |
| | MAPK3; NRIP1; CHEK2; RELA; TP73; GSTP1; RB1; |
| | SRC; CDK2; AHR; NFE2L2; NCOA3; TP53; TNF; |
| | CDKNIA; NCOA2; APAF1; NFKB1; CCND1; ATM; ESR1; |
| | CDKN2A; MYC; JUN; ESR2; BAX; IL6; CYP1B1; |
| | HSP90AA1 |
| Xenobiotic Metabolism | PRKCE; EP300; PRKCZ; RXRA; MAPK1; NQO1; |
| Signaling | NCOR2; PIK3CA; ARNT; PRKCI; NFKB2; CAMK2A; |
| | PIK3CB; PPP2R1A; PIK3C3; MAPK8; PRKD1; |
| | ALDH1A1; MAPK3; NRIP1; KRAS; MAPK13; PRKCD; |
| | GSTP1; MAPK9; NOS2A; ABCB1; AHR; PPP2CA; FTL; |
| | NFE2L2; PIK3C2A; PPARGCIA; MAPK14; TNF; RAF1; |
| | CREBBP; MAP2K2; PIK3R1; PPP2R5C; MAP2K1; |
| | NFKB1; KEAP1; PRKCA; EIF2AK3; IL6; CYP1B1; |
| | HSP90AA1 |
| SAPK/JNK Signaling | PRKCE; IRAK1; PRKAA2; EIF2AK2; RAC1; ELK1; |
| | GRK6; MAPK1; GADD45A; RAC2; PLK1; AKT2; PIK3CA; |
| | FADD; CDK8; PIK3CB; PIK3C3; MAPK8; RIPK1; |
| | GNB2L1; IRS1; MAPK3; MAPK10; DAXX; KRAS; |
| | PRKCD; PRKAA1; MAPK9; CDK2; PIM1; PIK3C2A; |
| | TRAF2; TP53; LCK; MAP3K7; DYRK1A; MAP2K2; |
| | PIK3R1; MAP2K1; PAK3; CDC42; JUN; TTK; CSNK1A1; |
| | CRKL; BRAF; SGK |
| PPAr/RXR Signaling | PRKAA2; EP300; INS; SMAD2; TRAF6; PPARA; FASN; |
| | RXRA; MAPK1; SMAD3; GNAS; IKBKB; NCOR2; |
| | ABCA1; GNAQ; NFKB2; MAP3K14; STAT5B; MAPK8; |
| | IRS1; MAPK3; KRAS; RELA; PRKAA1; PPARGC1A; |
| | NCOA3; MAPK14; INSR; RAF1; IKBKG; RELB; MAP3K7; |
| | CREBBP; MAP2K2; JAK2; CHUK; MAP2K1; NFKB1; |
| | TGFBR1; SMAD4; JUN; IL1R1; PRKCA; IL6; HSP90AA1; |
| | ADIPOQ |
| NF-KB Signaling | IRAK1; EIF2AK2; EP300; INS; MYD88; PRKCZ; TRAF6; |
| | TBK1; AKT2; EGFR; IKBKB; PIK3CA; BTRC; NFKB2; |
| | MAP3K14; PIK3CB; PIK3C3; MAPK8; RIPK1; HDAC2; |
| | KRAS; RELA; PIK3C2A; TRAF2; TLR4; PDGFRB; TNF; |
| | INSR; LCK; IKBKG; RELB; MAP3K7; CREBBP; AKT1; |
| | PIK3R1; CHUK; PDGFRA; NFKB1; TLR2; BCL10; |
| | GSK3B; AKT3; TNFAIP3; IL1R1 |
| Neuregulin Signaling | ERBB4; PRKCE; ITGAM; ITGA5; PTEN; PRKCZ; ELK1; |
| | MAPK1; PTPN11; AKT2; EGFR; ERBB2; PRKCI; |
| | CDKN1B; STAT5B; PRKD1; MAPK3; ITGA1; KRAS; |
| | PRKCD; STAT5A; SRC; ITGB7; RAF1; ITGB1; MAP2K2; |
| | ADAM17; AKT1; PIK3R1; PDPK1; MAP2K1; ITGB3; |
| | EREG; FRAP1; PSEN1; ITGA2; MYC; NRG1; CRKL; |
| | AKT3; PRKCA; HSP90AA1; RPS6KB1 |
| Wnt & Beta catenin | CD44; EP300; LRP6; DVL3; CSNK1E; GJA1; SMO; |
| Signaling | AKT2; PIN1; CDH1; BTRC; GNAQ; MARK2; PPP2R1A; |
| | WNT11; SRC; DKK1; PPP2CA; SOX6; SFRP2; ILK; |
| | LEF1; SOX9; TP53; MAP3K7; CREBBP; TCF7L2; AKT1; |
| | PPP2R5C; WNT5A; LRP5; CTNNB1; TGFBR1; CCND1; |
| | GSK3A; DVL1; APC; CDKN2A; MYC; CSNK1A1; GSK3B; |
| | AKT3; SOX2 |
| Insulin Receptor | PTEN; INS; EIF4E; PTPN1; PRKCZ; MAPK1; TSC1; |
| Signaling | PTPN11; AKT2; CBL; PIK3CA; PRKCI; PIK3CB; PIK3C3; |
| | MAPK8; IRS1; MAPK3; TSC2; KRAS; EIF4EBP1; |
| | SLC2A4; PIK3C2A; PPP1CC; INSR; RAF1; FYN; |
| | MAP2K2; JAK1; AKT1; JAK2; PIK3R1; PDPK1; MAP2K1; |
| | GSK3A; FRAP1; CRKL; GSK3B; AKT3; FOXO1; SGK; |
| | RPS6KB1 |
| IL-6 Signaling | HSPB1; TRAF6; MAPKAPK2; ELK1; MAPK1; PTPN11; |
| | IKBKB; FOS; NFKB2; MAP3K14; MAPK8; MAPK3; |
| | MAPK10; IL6ST; KRAS; MAPK13; IL6R; RELA; SOCS1; |
| | MAPK9; ABCB1; TRAF2; MAPK14; TNF; RAF1; IKBKG; |
| | RELB; MAP3K7; MAP2K2; IL8; JAK2; CHUK; STAT3; |
| | MAP2K1; NFKB1; CEBPB; JUN; IL1R1; SRF; IL6 |
| Hepatic Cholestasis | PRKCE; IRAK1; INS; MYD88; PRKCZ; TRAF6; PPARA; |
| | RXRA; IKBKB; PRKCI; NFKB2; MAP3K14; MAPK8; |
| | PRKD1; MAPK10; RELA; PRKCD; MAPK9; ABCB1; |
| | TRAF2; TLR4; TNF; INSR; IKBKG; RELB; MAP3K7; IL8; |
| | CHUK; NR1H2; TJP2; NFKB1; ESR1; SREBF1; FGFR4; |
| | JUN; IL1R1; PRKCA; IL6 |
| IGF-1 Signaling | IGF1; PRKCZ; ELK1; MAPK1; PTPN11; NEDD4; AKT2; |
| | PIK3CA; PRKCI; PTK2; FOS; PIK3CB; PIK3C3; MAPK8; |
| | IGF1R; IRS1; MAPK3; IGFBP7; KRAS; PIK3C2A; |
| | YWHAZ; PXN; RAF1; CASP9; MAP2K2; AKT1; PIK3R1; |
| | PDPK1; MAP2K1; IGFBP2; SFN; JUN; CYR61; AKT3; |
| | FOXO1; SRF; CTGF; RPS6KB1 |
| NRF2-mediated Oxidative | PRKCE; EP300; SOD2; PRKCZ; MAPK1; SQSTM1; |
| Stress Response | NQO1; PIK3CA; PRKCI; FOS; PIK3CB; PIK3C3; MAPK8; |
| | PRKD1; MAPK3; KRAS; PRKCD; GSTP1; MAPK9; FTL; |
| | NFE2L2; PIK3C2A; MAPK14; RAF1; MAP3K7; CREBBP; |
| | MAP2K2; AKT1; PIK3R1; MAP2K1; PPIB; JUN; KEAP1; |
| | GSK3B; ATF4; PRKCA; EIF2AK3; HSP90AA1 |
| Hepatic Fibrosis/Hepatic | EDN1; IGF1; KDR; FLT1; SMAD2; FGFR1; MET; PGF; |
| Stellate Cell Activation | SMAD3; EGFR; FAS; CSF1; NFKB2; BCL2; MYH9; |
| | IGF1R; IL6R; RELA; TLR4; PDGFRB; TNF; RELB; IL8; |
| | PDGFRA; NFKB1; TGFBR1; SMAD4; VEGFA; BAX; |
| | IL1R1; CCL2; HGF; MMP1; STAT1; IL6; CTGF; MMP9 |
| PPAR Signaling | EP300; INS; TRAF6; PPARA; RXRA; MAPK1; IKBKB; |
| | NCOR2; FOS; NFKB2; MAP3K14; STAT5B; MAPK3; |
| | NRIP1; KRAS; PPARG; RELA; STAT5A; TRAF2; |
| | PPARGC1A; PDGFRB; TNF; INSR; RAF1; IKBKG; |
| | RELB; MAP3K7; CREBBP; MAP2K2; CHUK; PDGFRA; |
| | MAP2K1; NFKB1; JUN; IL1R1; HSP90AA1 |
| Fc Epsilon RI Signaling | PRKCE; RAC1; PRKCZ; LYN; MAPK1; RAC2; PTPN11; |
| | AKT2; PIK3CA; SYK; PRKCI; PIK3CB; PIK3C3; MAPK8; |
| | PRKD1; MAPK3; MAPK10; KRAS; MAPK13; PRKCD; |
| | MAPK9; PIK3C2A; BTK; MAPK14; TNF; RAF1; FYN; |
| | MAP2K2; AKT1; PIK3R1; PDPK1; MAP2K1; AKT3; |
| | VAV3; PRKCA |
| G-Protein Coupled | PRKCE; RAP1A; RGS16; MAPK1; GNAS; AKT2; IKBKB; |
| Receptor Signaling | PIK3CA; CREB1; GNAQ; NFKB2; CAMK2A; PIK3CB; |
| | PIK3C3; MAPK3; KRAS; RELA; SRC; PIK3C2A; RAF1; |
| | IKBKG; RELB; FYN; MAP2K2; AKT1; PIK3R1; CHUK; |
| | PDPK1; STAT3; MAP2K1; NFKB1; BRAF; ATF4; AKT3; |
| | PRKCA |
| Inositol Phosphate | PRKCE; IRAK1; PRKAA2; EIF2AK2; PTEN; GRK6; |
| Metabolism | MAPK1; PLK1; AKT2; PIK3CA; CDK8; PIK3CB; PIK3C3; |
| | MAPK8; MAPK3; PRKCD; PRKAA1; MAPK9; CDK2; |
| | PIM1; PIK3C2A; DYRK1A; MAP2K2; PIP5K1A; PIK3R1; |
| | MAP2K1; PAK3; ATM; TTK; CSNKIA1; BRAF; SGK |
| PDGF Signaling | EIF2AK2; ELK1; ABL2; MAPK1; PIK3CA; FOS; PIK3CB; |
| | PIK3C3; MAPK8; CAV1; ABL1; MAPK3; KRAS; SRC; |
| | PIK3C2A; PDGFRB; RAF1; MAP2K2; JAK1; JAK2; |
| | PIK3R1; PDGFRA; STAT3; SPHK1; MAP2K1; MYC; |
| | JUN; CRKL; PRKCA; SRF; STAT1; SPHK2 |
| VEGF Signaling | ACTN4; ROCK1; KDR; FLT1; ROCK2; MAPK1; PGF; |
| | AKT2; PIK3CA; ARNT; PTK2; BCL2; PIK3CB; PIK3C3; |
| | BCL2L1; MAPK3; KRAS; HIF1A; NOS3; PIK3C2A; PXN; |
| | RAF1; MAP2K2; ELAVL1; AKT1; PIK3R1; MAP2K1; SFN; |
| | VEGFA; AKT3; FOXO1; PRKCA |
| Natural Killer Cell | PRKCE; RAC1; PRKCZ; MAPK1; RAC2; PTPN11; |
| Signaling | KIR2DL3; AKT2; PIK3CA; SYK; PRKCI; PIK3CB; |
| | PIK3C3; PRKD1; MAPK3; KRAS; PRKCD; PTPN6; |
| | PIK3C2A; LCK; RAF1; FYN; MAP2K2; PAK4; AKT1; |
| | PIK3R1; MAP2K1; PAK3; AKT3; VAV3; PRKCA |
| Cell Cycle: G1/S | HDAC4; SMAD3; SUV39H1; HDAC5; CDKNIB; BTRC; |
| Checkpoint Regulation | ATR; ABL1; E2F1; HDAC2; HDAC7A; RB1; HDAC11; |
| | HDAC9; CDK2; E2F2; HDAC3; TP53; CDKNIA; CCND1; |
| | E2F4; ATM; RBL2; SMAD4; CDKN2A; MYC; NRG1; |
| | GSK3B; RBL1; HDAC6 |
| T Cell Receptor Signaling | RAC1; ELK1; MAPK1; IKBKB; CBL; PIK3CA; FOS; |
| | NFKB2; PIK3CB; PIK3C3; MAPK8; MAPK3; KRAS; |
| | RELA; PIK3C2A; BTK; LCK; RAF1; IKBKG; RELB; FYN; |
| | MAP2K2; PIK3R1; CHUK; MAP2K1; NFKB1; ITK; BCL10; |
| | JUN; VAV3 |
| Death Receptor Signaling | CRADD; HSPB1; BID; BIRC4; TBK1; IKBKB; FADD; |
| | FAS; NFKB2; BCL2; MAP3K14; MAPK8; RIPK1; CASP8; |
| | DAXX; TNFRSF10B; RELA; TRAF2; TNF; IKBKG; RELB; |
| | CASP9; CHUK; APAF1; NFKB1; CASP2; BIRC2; CASP3; |
| | BIRC3 |
| FGF Signaling | RAC1; FGFR1; MET; MAPKAPK2; MAPK1; PTPN11; |
| | AKT2; PIK3CA; CREB1; PIK3CB; PIK3C3; MAPK8; |
| | MAPK3; MAPK13; PTPN6; PIK3C2A; MAPK14; RAF1; |
| | AKT1; PIK3R1; STAT3; MAP2K1; FGFR4; CRKL; ATF4; |
| | AKT3; PRKCA; HGF |
| GM-CSF Signaling | LYN; ELK1; MAPK1; PTPN11; AKT2; PIK3CA; CAMK2A; |
| | STAT5B; PIK3CB; PIK3C3; GNB2L1; BCL2L1; MAPK3; |
| | ETS1; KRAS; RUNX1; PIM1; PIK3C2A; RAF1; MAP2K2; |
| | AKT1; JAK2; PIK3R1; STAT3; MAP2K1; CCND1; AKT3; |
| | STAT1 |
| Amyotrophic Lateral | BID; IGF1; RAC1; BIRC4; PGF; CAPNS1; CAPN2; |
| Sclerosis Signaling | PIK3CA; BCL2; PIK3CB; PIK3C3; BCL2L1; CAPN1; |
| | PIK3C2A; TP53; CASP9; PIK3R1; RAB5A; CASP1; |
| | APAF1; VEGFA; BIRC2; BAX; AKT3; CASP3; BIRC3 |
| JAK/Stat Signaling | PTPN1; MAPK1; PTPN11; AKT2; PIK3CA; STAT5B; |
| | PIK3CB; PIK3C3; MAPK3; KRAS; SOCS1; STAT5A; |
| | PTPN6; PIK3C2A; RAF1; CDKNIA; MAP2K2; JAK1; |
| | AKT1; JAK2; PIK3R1; STAT3; MAP2K1; FRAP1; AKT3; |
| | STAT1 |
| Nicotinate and | PRKCE; IRAK1; PRKAA2; EIF2AK2; GRK6; MAPK1; |
| Nicotinamide Metabolism | PLK1; AKT2; CDK8; MAPK8; MAPK3; PRKCD; PRKAA1; |
| | PBEF1; MAPK9; CDK2; PIM1; DYRKIA; MAP2K2; |
| | MAP2K1; PAK3; NT5E; TTK; CSNK1A1; BRAF; SGK |
| Chemokine Signaling | CXCR4; ROCK2; MAPK1; PTK2; FOS; CFL1; GNAQ; |
| | CAMK2A; CXCL12; MAPK8; MAPK3; KRAS; MAPK13; |
| | RHOA; CCR3; SRC; PPP1CC; MAPK14; NOX1; RAF1; |
| | MAP2K2; MAP2K1; JUN; CCL2; PRKCA |
| IL-2 Signaling | ELK1; MAPK1; PTPN11; AKT2; PIK3CA; SYK; FOS; |
| | STAT5B; PIK3CB; PIK3C3; MAPK8; MAPK3; KRAS; |
| | SOCS1; STAT5A; PIK3C2A; LCK; RAF1; MAP2K2; |
| | JAK1; AKT1; PIK3R1; MAP2K1; JUN; AKT3 |
| Synaptic Long Term | PRKCE; IGF1; PRKCZ; PRDX6; LYN; MAPK1; GNAS; |
| Depression | PRKCI; GNAQ; PPP2R1A; IGF1R; PRKD1; MAPK3; |
| | KRAS; GRN; PRKCD; NOS3; NOS2A; PPP2CA; |
| | YWHAZ; RAF1; MAP2K2; PPP2R5C; MAP2K1; PRKCA |
| Estrogen Receptor | TAF4B; EP300; CARM1; PCAF; MAPK1; NCOR2; |
| Signaling | SMARCA4; MAPK3; NRIP1; KRAS; SRC; NR3C1; |
| | HDAC3; PPARGCIA; RBM9; NCOA3; RAF1; CREBBP; |
| | MAP2K2; NCOA2; MAP2K1; PRKDC; ESR1; ESR2 |
| Protein Ubiquitination | TRAF6; SMURF1; BIRC4; BRCA1; UCHL1; NEDD4; |
| Pathway | CBL; UBE2I; BTRC; HSPA5; USP7; USP10; FBXW7; |
| | USP9X; STUB1; USP22; B2M; BIRC2; PARK2; USP8; |
| | USP1; VHL; HSP90AA1; BIRC3 |
| IL-10 Signaling | TRAF6; CCR1; ELK1; IKBKB; SP1; FOS; NFKB2; |
| | MAP3K14; MAPK8; MAPK13; RELA; MAPK14; TNF; |
| | IKBKG; RELB; MAP3K7; JAK1; CHUK; STAT3; NFKB1; |
| | JUN; ILIR1; IL6 |
| VDR/RXR Activation | PRKCE; EP300; PRKCZ; RXRA; GADD45A; HES1; |
| | NCOR2; SP1; PRKCI; CDKN1B; PRKD1; PRKCD; |
| | RUNX2; KLF4; YY1; NCOA3; CDKNIA; NCOA2; SPP1; |
| | LRP5; CEBPB; FOXO1; PRKCA |
| TGF-beta Signaling | EP300; SMAD2; SMURF1; MAPK1; SMAD3; SMAD1; |
| | FOS; MAPK8; MAPK3; KRAS; MAPK9; RUNX2; |
| | SERPINE1; RAF1; MAP3K7; CREBBP; MAP2K2; |
| | MAP2K1; TGFBR1; SMAD4; JUN; SMAD5 |
| Toll-like Receptor | IRAK1; EIF2AK2; MYD88; TRAF6; PPARA; ELK1; |
| Signaling | IKBKB; FOS; NFKB2; MAP3K14; MAPK8; MAPK13; |
| | RELA; TLR4; MAPK14; IKBKG; RELB; MAP3K7; CHUK; |
| | NFKB1; TLR2; JUN |
| p38 MAPK Signaling | HSPB1; IRAK1; TRAF6; MAPKAPK2; ELK1; FADD; FAS; |
| | CREB1; DDIT3; RPS6KA4; DAXX; MAPK13; TRAF2; |
| | MAPK14; TNF; MAP3K7; TGFBR1; MYC; ATF4; ILIR1; |
| | SRF; STAT1 |
| Neurotrophin/TRK | NTRK2; MAPK1; PTPN11; PIK3CA; CREB1; FOS; |
| Signaling | PIK3CB; PIK3C3; MAPK8; MAPK3; KRAS; PIK3C2A; |
| | RAF1; MAP2K2; AKT1; PIK3R1; PDPK1; MAP2K1; |
| | CDC42; JUN; ATF4 |
| FXR/RXR Activation | INS; PPARA; FASN; RXRA; AKT2; SDC1; MAPK8; |
| | APOB; MAPK10; PPARG; MTTP; MAPK9; PPARGC1A; |
| | TNF; CREBBP; AKT1; SREBF1; FGFR4; AKT3; FOXO1 |
| Synaptic Long Term | PRKCE; RAP1A; EP300; PRKCZ; MAPK1; CREB1; |
| Potentiation | PRKCI; GNAQ; CAMK2A; PRKD1; MAPK3; KRAS; |
| | PRKCD; PPP1CC; RAF1; CREBBP; MAP2K2; MAP2K1; |
| | ATF4; PRKCA |
| Calcium Signaling | RAPIA; EP300; HDAC4; MAPK1; HDAC5; CREB1; |
| | CAMK2A; MYH9; MAPK3; HDAC2; HDAC7A; HDAC11; |
| | HDAC9; HDAC3; CREBBP; CALR; CAMKK2; ATF4; |
| | HDAC6 |
| EGF Signaling | ELK1; MAPK1; EGFR; PIK3CA; FOS; PIK3CB; PIK3C3; |
| | MAPK8; MAPK3; PIK3C2A; RAF1; JAK1; PIK3R1; |
| | STAT3; MAP2K1; JUN; PRKCA; SRF; STAT1 |
| Hypoxia Signaling in the | EDN1; PTEN; EP300; NQO1; UBE2I; CREB1; ARNT; |
| Cardiovascular System | HIF1A; SLC2A4; NOS3; TP53; LDHA; AKT1; ATM; |
| | VEGFA; JUN; ATF4; VHL; HSP90AA1 |
| LPS/IL-1 Mediated | IRAK1; MYD88; TRAF6; PPARA; RXRA; ABCA1; |
| Inhibition of RXR | MAPK8; ALDH1A1; GSTP1; MAPK9; ABCB1; TRAF2; |
| Function | TLR4; TNF; MAP3K7; NR1H2; SREBF1; JUN; IL1R1 |
| LXR/RXR Activation | FASN; RXRA; NCOR2; ABCA1; NFKB2; IRF3; RELA; |
| | NOS2A; TLR4; TNF; RELB; LDLR; NR1H2; NFKB1; |
| | SREBF1; IL1R1; CCL2; IL6; MMP9 |
| Amyloid Processing | PRKCE; CSNK1E; MAPK1; CAPNS1; AKT2; CAPN2; |
| | CAPN1; MAPK3; MAPK13; MAPT; MAPK14; AKT1; |
| | PSEN1; CSNK1A1; GSK3B; AKT3; APP |
| IL-4 Signaling | AKT2; PIK3CA; PIK3CB; PIK3C3; IRS1; KRAS; SOCS1; |
| | PTPN6; NR3C1; PIK3C2A; JAK1; AKT1; JAK2; PIK3R1; |
| | FRAP1; AKT3; RPS6KB1 |
| Cell Cycle: G2/M DNA | EP300; PCAF; BRCA1; GADD45A; PLK1; BTRC; |
| Damage Checkpoint | CHEK1; ATR; CHEK2; YWHAZ; TP53; CDKN1A; |
| Regulation | PRKDC; ATM; SFN; CDKN2A |
| Nitric Oxide Signaling | KDR; FLT1; PGF; AKT2; PIK3CA; PIK3CB; PIK3C3; |
| in the Cardiovascular | CAV1; PRKCD; NOS3; PIK3C2A; AKT1; PIK3R1; |
| System | VEGFA; AKT3; HSP90AA1 |
| Purine Metabolism | NME2; SMARCA4; MYH9; RRM2; ADAR; EIF2AK4; |
| | PKM2; ENTPD1; RAD51; RRM2B; TJP2; RAD51C; |
| | NT5E; POLD1; NME1 |
| CAMP-mediated | RAP1A; MAPK1; GNAS; CREB1; CAMK2A; MAPK3; |
| Signaling | SRC; RAF1; MAP2K2; STAT3; MAP2K1; BRAF; ATF4 |
| Mitochondrial | SOD2; MAPK8; CASP8; MAPK10; MAPK9; CASP9; |
| Dysfunction Notch | PARK7; PSEN1; PARK2; APP; CASP3 |
| Signaling | HES1; JAG1; NUMB; NOTCH4; ADAM17; NOTCH2; |
| | PSEN1; NOTCH3; NOTCH1; DLL4 |
| Endoplasmic Reticulum | HSPA5; MAPK8; XBP1; TRAF2; ATF6; CASP9; ATF4; |
| Stress | EIF2AK3; CASP3 |
| Pathway Pyrimidine | NME2; AICDA; RRM2; EIF2AK4; ENTPD1; RRM2B; |
| Metabolism | NT5E; POLD1; NME1 |
| Parkinson's Signaling | UCHL1; MAPK8; MAPK13; MAPK14; CASP9; PARK7; |
| | PARK2; CASP3 |
| Cardiac & Beta | GNAS; GNAQ; PPP2R1A; GNB2L1; PPP2CA; PPP1CC; |
| Adrenergic Signaling | PPP2R5C |
| Glycolysis/Gluconeogenesis | HK2; GCK; GPI; ALDH1A1; PKM2; LDHA; HK1 |
| Interferon Signaling | IRF1; SOCS1; JAK1; JAK2; IFITM1; STAT1; IFIT3 |
| Sonic Hedgehog Signaling | ARRB2; SMO; GLI2; DYRK1A; GLI1; GSK3B; DYRK1B |
| Glycerophospholipid | PLD1; GRN; GPAM; YWHAZ; SPHK1; SPHK2 |
| Metabolism | |
| Phospholipid Degradation | PRDX6; PLD1; GRN; YWHAZ; SPHK1; SPHK2 |
| Tryptophan Metabolism | SIAH2; PRMT5; NEDD4; ALDH1A1; CYP1B1; SIAH1 |
| Lysine Degradation | SUV39H1; EHMT2; NSD1; SETD7; PPP2R5C |
| Nucleotide Excision | ERCC5; ERCC4; XPA; XPC; ERCC1 |
| Repair Pathway | |
| Starch and Sucrose | UCHL1; HK2; GCK; GPI; HK1 |
| Metabolism | |
| Amino sugars Metabolism | NQO1; HK2; GCK; HK1 |
| Arachidonic Acid | PRDX6; GRN; YWHAZ; CYP1B1 |
| Metabolism | |
| Circadian Rhythm | CSNK1E; CREB1; ATF4; NR1D1 |
| Signaling | |
| Coagulation System | BDKRB1; F2R; SERPINE1; F3 |
| Dopamine Receptor | PPP2R1A; PPP2CA; PPPICC; PPP2R5C |
| Signaling | |
| Glutathione Metabolism | IDH2; GSTP1; ANPEP; IDH1 |
| Glycerolipid Metabolism | ALDHIA1; GPAM; SPHK1; SPHK2 |
| Linoleic Acid Metabolism | PRDX6; GRN; YWHAZ; CYP1B1 |
| Methionine Metabolism | DNMT1; DNMT3B; AHCY; DNMT3A |
| Pyruvate Metabolism | GLO1; ALDHIA1; PKM2; LDHA |
| Arginine and Proline | ALDH1A1; NOS3; NOS2A |
| Metabolism | |
| Eicosanoid Signaling | PRDX6; GRN; YWHAZ |
| Fructose and Mannose | HK2; GCK; HK1 |
| Metabolism | |
| Galactose Metabolism | HK2; GCK; HK1 |
| Stilbene, Coumarine and | PRDX6; PRDX1; TYR |
| Lignin Biosynthesis | |
| Antigen Presentation | CALR; B2M |
| Pathway | |
| Biosynthesis of Steroids | NQO1; DHCR7 |
| Butanoate Metabolism | ALDH1A1; NLGN1 |
| Citrate Cycle | IDH2; IDH1 |
| Fatty Acid Metabolism | ALDH1A1; CYP1B1 |
| Glycerophospholipid | PRDX6; CHKA |
| Metabolism | |
| Histidine Metabolism | PRMT5; ALDH1A1 |
| Inositol Metabolism | ERO1L; APEX1 |
| Metabolism of Xenobiotics | GSTP1; CYP1B1 |
| by Cytochrome p450 | |
| Methane Metabolism | PRDX6; PRDX1 |
| Phenylalanine Metabolism | PRDX6; PRDX1 |
| Propanoate Metabolism | ALDH1A1; LDHA |
| Selenoamino Acid | PRMT5; AHCY |
| Metabolism | |
| Sphingolipid Metabolism | SPHK1; SPHK2 |
| Aminophosphonate | PRMT5 |
| Metabolism | |
| Androgen and Estrogen | PRMT5 |
| Metabolism | |
| Ascorbate and Aldarate | ALDH1A1 |
| Metabolism | |
| Bile Acid Biosynthesis | ALDH1A1 |
| Cysteine Metabolism | LDHA |
| Fatty Acid Biosynthesis | FASN |
| Glutamate Receptor | GNB2L1 |
| Signaling | |
| NRF2-mediated Oxidative | PRDX1 |
| Stress Response | |
| Pentose Phosphate Pathway | GPI |
| Pentose and Glucuronate | UCHL1 |
| Interconversions | |
| Retinol Metabolism | ALDH1A1 |
| Riboflavin Metabolism | TYR |
| Tyrosine Metabolism | PRMT5, TYR |
| Ubiquinone Biosynthesis | PRMT5 |
| Valine, Leucine and | ALDH1A1 |
| Isoleucine Degradation | |
| Glycine, Serine and | CHKA |
| Threonine Metabolism | |
| Lysine Degradation | ALDH1A1 |
| Pain/Taste | TRPM5; TRPA1 |
| Pain | TRPM7; TRPC5; TRPC6; TRPC1; Cnr1; cnr2; Grk2; |
| | Trpa1; Pomc; Cgrp; Crf; Pka; Era; Nr2b; TRPM5; Prkaca; |
| | Prkacb; Prkar1a; Prkar2a |
| Mitochondrial Function | AIF; CytC; SMAC (Diablo); Aifm-1; Aifm-2 |
| Developmental Neurology | BMP-4; Chordin (Chrd); Noggin (Nog); WNT (Wnt2; |
| | Wnt2b; Wnt3a; Wnt4; Wnt5a; Wnt6; Wnt7b; Wnt8b; |
| | Wnt9a; Wnt9b; Wnt10a; Wnt10b; Wnt16); beta-catenin; |
| | Dkk-1; Frizzled related proteins; Otx-2; Gbx2; FGF-8; |
| | Reelin; Dab1; unc-86 (Pou4f1 or Brn3a); Numb; Reln |

[0481] Thus, also described herein are methods of inducing one or more mutations in a eukaryotic or prokaryotic cell (in vitro, i.e., in an isolated eukaryotic cell) as herein discussed comprising delivering to cell a vector as described herein. The mutation(s) can include the introduction, deletion, or substitution of one or more nucleotides at a target sequence of cell(s). In some embodiments, the mutations can include the introduction, deletion, or substitution of 1-75 nucleotides at each target sequence of said cell(s). The mutations can include the introduction, deletion, or substitution of 1, 5, 10, 11, 12, 13, 14, 15, 16, 17, 18, 19, 20, 21, 22, 23. 24. 25, 26. 27. 28. 29. 30. 35, 40. 45, 50, or 75 nucleotides at each target sequence. The mutations can include the introduction, deletion, or substitution of 5, 10, 11, 12, 13, 14, 15, 16, 17, 18, 19, 20, 21, 22, 23, 24, 25, 26, 27, 28, 29, 30, 35, 40, 45, 50, or 75 nucleotides at each target sequence of said cell(s). The mutations include the introduction, deletion, or substitution of 10, 11, 12, 13, 14, 15, 16, 17, 18, 19, 20, 21, 22, 23, 24, 25, 26, 27, 28, 29, 30, 35, 40, 45, 50, or 75 nucleotides at each target sequence of said cell(s). The mutations can include the introduction, deletion, or substitution of 20, 21, 22, 23, 24, 25, 26, 27, 28, 29, 30, 35, 40, 45, 50, or 75 nucleotides at each target sequence of said cell(s). The mutations can include the introduction, deletion, or substitution of 40, 45, 50, 75, 100, 200, 300, 400 or 500 nucleotides at each target sequence of said cell(s). The mutations can include the introduction, deletion, or substitution of 500, 600, 700, 800, 900, 1000, 1100, 1200, 1300, 1400, 1500, 1600, 1700, 1800, 1900, 2000, 2100, 2200, 2300, 2400, 2500, 2600, 2700, 2800, 2900, 3000, 3100, 3200, 3300, 3400, 3500, 3600, 3700, 3800, 3900, 4000, 4100, 4200, 4300, 4400, 4500, 4600, 4700, 4800, 4900, 5000, 5100, 5200, 5300, 5400, 5500, 5600, 5700, 5800, 5900, 6000, 6100, 6200, 6300, 6400, 6500, 6600, 6700, 6800, 6900, 7000, 7100, 7200, 7300, 7400, 7500, 7600, 7700, 7800, 7900, 8000, 8100, 8200, 8300, 8400, 8500, 8600, 8700, 8800, 8900, 9000, 9100, 9200, 9300, 9400, 9500, 9600, 9700, 9800, or 9900 to 10000 nucleotides at each target sequence of said cell(s).

[0482] In some embodiments, the modifications can include the introduction, deletion, or substitution of nucleotides at each target sequence of said cell(s) via nucleic acid components (e.g., guide(s) RNA(s) or sgRNA(s)), such as those mediated by a CRISPR-Cas system.

[0483] In some embodiments, the modifications can include the introduction, deletion, or substitution of nucleotides at a target or random sequence of said cell(s) via a non CRISPR-Cas system or technique. Such techniques are discussed elsewhere herein, such as where engineered cells and methods of generating the engineered cells and organisms are discussed.

[0484] For minimization of toxicity and off-target effect when using a CRISPR-Cas system, it may be important to control the concentration of Cas mRNA and guide RNA delivered. Optimal concentrations of Cas mRNA and guide RNA can be determined by testing different concentrations in a cellular or non-human eukaryote animal model and using deep sequencing the analyze the extent of modification at potential off-target genomic loci. Alternatively, to minimize the level of toxicity and off-target effect, Cas nickase mRNA (for example S. pyogenes Cas9-like with the D10A mutation) can be delivered with a pair of guide RNAs targeting a site of interest. Guide sequences and strategies to minimize toxicity and off-target effects can be as in WO 2014/093622 (PCT/US2013/074667); or, via mutation as herein.

[0485] Typically, in the context of an endogenous CRISPR system, formation of a CRISPR complex (comprising a guide sequence hybridized to a target sequence and complexed with one or more Cas proteins) results in cleavage of one or both strands in or near (e.g., within 1, 2, 3, 4, 5, 6, 7, 8, 9, 10, 20, 50, or more base pairs from) the target sequence. Without wishing to be bound by theory, a tracr sequence, which may comprise or consist of all or a portion of a wild-type tracr sequence (e.g. about or more than about 20, 26, 32, 45, 48, 54, 63, 67, 85, or more nucleotides of a wild-type tracr sequence), may also form part of a CRISPR complex, such as by hybridization along at least a portion of the tracr sequence to all or a portion of a tracr mate sequence that is operably linked to a guide sequence.

[0486] In one embodiment, the invention provides a method of modifying a target polynucleotide in a eukaryotic cell. In some embodiments, the method includes delivering an engineered targeting moiety, polypeptide, polynucleotide, vector, vector system, particle, viral (e.g., AAV) particle, cell, or any combination thereof described herein having a genetic modifying agent (including, but not limited to, a CRISPR-Cas system or system component) as a cargo molecule to a subject and/or cell. The CRISPR-Cas system molecule(s) delivered can complex to bind to the target polynucleotide, e.g., to effect cleavage of said target polynucleotide, thereby modifying the target polynucleotide, wherein the CRISPR complex comprises a CRISPR enzyme complexed with a guide sequence hybridized to a target sequence within said target polynucleotide, wherein said guide sequence can be linked to a tracr mate sequence which in turn hybridizes to a tracr sequence. In some embodiments, said cleavage comprises cleaving one or two strands at the location of the target sequence by said CRISPR enzyme. In some embodiments, said cleavage results in decreased transcription of a target gene. In some embodiments, the method further comprises repairing said cleaved target polynucleotide by homologous recombination with an exogenous template polynucleotide, wherein said repair results in a mutation comprising an insertion, deletion, or substitution of one or more nucleotides of said target polynucleotide. In some embodiments, said mutation results in one or more amino acid changes in a protein expressed from a gene comprising the target sequence. In some embodiments, the method further comprises delivering one or more vectors to said eukaryotic cell, wherein one or more vectors comprise the CRISPR enzyme and one or more vectors drive expression of one or more of: the guide sequence linked to the tracr mate sequence, and the tracr sequence. In some embodiments, said CRISPR enzyme drive expression of one or more of: the guide sequence linked to the tracr mate sequence, and the tracr sequence. In some embodiments such CRISPR enzyme are delivered to the eukaryotic cell in a subject. In some embodiments, said modifying takes place in said eukaryotic cell in a cell culture. In some embodiments, the method further comprises isolating said eukaryotic cell from a subject prior to said modifying. In some embodiments, the method further comprises returning said eukaryotic cell and/or cells derived therefrom to said subject. In some embodiments, the isolated cells can be returned to the subject after delivery of one or more engineered targeting moieties, polypeptides, polynucleotides, vectors, vector systems, particles, viral (e.g., AAV) particles, cells, or any combination thereof described herein to the isolated cell. In some embodiments, the isolated cells can be returned to the subject after delivering one or more molecules of the engineered delivery system described herein to the isolated cell, thus making the isolated cells engineered cells as previously described.

### Screening and Cell Selection

[0487] The targeting moieties, polypeptides, polynucleotides, vectors, vector systems, particles, viral (e.g., AAV) particles, cells, or any combination thereof described herein described herein can be used in a screening assay and/or cell selection assay. The engineered targeting moieties, polypeptides, polynucleotides, vectors, vector systems, particles, viral (e.g., AAV) particles, cells, or any combination thereof described herein can be delivered to a subject and/or cell. In some embodiments, the cell is a eukaryotic cell. The cell can be in vitro, ex vivo, in situ, or in vivo. The targeting moieties, polypeptides, polynucleotides, vectors, vector systems, particles, viral (e.g., AAV) particles, cells, or any combination thereof described herein can introduce an exogenous molecule or compound, such as a cargo, to subject or cell to which they are delivered. The presence of an exogenous molecule or compound can be detected which can allow for identification of a cell and/or attribute thereof. In some embodiments, the delivered molecules or particles can impart a gene or other nucleotide modification (e.g., mutations, gene or polynucleotide insertion and/or deletion, etc.). In some embodiments the nucleotide modification can be detected in a cell by sequencing. In some embodiments, the nucleotide modification can result in a physiological and/or biological modification to the cell that results in a detectable phenotypic change in the cell, which can allow for detection, identification, and/or selection of the cell. In some embodiments, the phenotypic change can be cell death, such as embodiments where binding of a CRISPR complex to a target polynucleotide results in cell death. Embodiments of the invention allow for selection of specific cells without requiring a selection marker or a two-step process that may include a counter-selection system. The cell(s) may be prokaryotic or eukaryotic cells.

[0488] In one embodiment the invention provides for a method of selecting one or more cell(s) by introducing one or more mutations in a gene in the one or more cell (s), the method comprising: introducing one or more vectors, which can include one or more engineered delivery system molecules or vectors described elsewhere herein, into the cell (s), wherein the one or more vectors can include a CRISPR enzyme and/or drive expression of one or more of: a guide sequence linked to a tracr mate sequence, a tracr sequence, and an editing template; or other polynucleotide to be inserted into the cell and/or genome thereof, wherein, for example that which is being expressed is within and expressed in vivo by the CRISPR enzyme and/or the editing template, when included, comprises the one or more mutations that abolish CRISPR enzyme cleavage; allowing homologous recombination of the editing template with the target polynucleotide in the cell(s) to be selected; allowing a CRISPR complex to bind to a target polynucleotide to effect cleavage of the target polynucleotide within said gene, wherein the CRISPR complex comprises the CRISPR enzyme complexed with (1) the guide sequence that is hybridized to the target sequence within the target polynucleotide, and (2) the tracr mate sequence that is hybridized to the tracr sequence, wherein binding of the CRISPR complex to the target polynucleotide induces cell death, thereby allowing one or more cell(s) in which one or more mutations have been introduced to be selected. In a preferred embodiment, the CRISPR enzyme is a Cas protein. In another embodiment of the invention the cell to be selected may be a eukaryotic cell.

[0489] The screening methods involving the engineered targeting moieties, polypeptides, polynucleotides, vectors, vector systems, particles, viral (e.g., AAV) particles, cells, or any combination thereof described herein, including but not limited to those that deliver one more CRISPR-Cas system molecules to cell, can be used in detection methods such as fluorescence in situ hybridization (FISH). In some embodiments, one or more components of an engineered CRISPR-Cas system that includes a catalytically inactive Cas protein, can be delivered by engineered targeting moieties, polypeptides, polynucleotides, vectors, vector systems, particles, viral (e.g. AAV) particles, cells, or any combination thereof described herein to a cell and used in a FISH method. The CRISPR-Cas system can include an inactivated Cas protein (dCas) (e.g. a dCas9), which lacks the ability to produce DNA double-strand breaks may be fused with a marker, such as fluorescent protein, such as the enhanced green fluorescent protein (eEGFP) and co-expressed with small guide RNAs to target pericentric, centric and teleomeric repeats in vivo. The dCas system can be used to visualize both repetitive sequences and individual genes in the human genome. Such new applications of labelled dCas, dCas CRISPR-Cas systems, engineered targeting moieties, polypeptides, polynucleotides, vectors, vector systems, particles, viral (e.g. AAV) particles, cells, or any combination thereof described herein can be used in imaging cells and studying the functional nuclear architecture, especially in cases with a small nucleus volume or complex 3-D structures. (Chen B, Gilbert L A, Cimini B A, Schnitzbauer J, Zhang W, Li G W, Park J, Blackburn E H, Weissman J S, Qi L S, Huang B. 2013. Dynamic imaging of genomic loci in living human cells by an optimized CRISPR/Cas system. Cell 155(7):1479-91. doi: 10.1016/j.cell.2013.12.001., the teachings of which can be applied and/or adapted to the CRISPR systems described herein. A similar approach involving a polynucleotide fused to a marker (e.g. a fluorescent marker) can be delivered to a cell via an engineered targeting moieties, polypeptides, polynucleotides, vectors, vector systems, particles, viral (e.g. AAV) particles, cells, or any combination thereof described herein and integrated into the genome of the cell and/or otherwise interact with a region of the genome of a cell for FISH analysis.

[0490] Similar approaches for studying other cell organelles and other cell structures can be accomplished by delivering to the cell (e.g., via an engineered targeting moieties, polypeptides, polynucleotides, vectors, vector systems, particles, viral (e.g. AAV) particles, cells, or any combination thereof described herein) one or more molecules fused to a marker (such as a fluorescent marker), wherein the molecules fused to the marker are capable of targeting one or more cell structures. By analyzing the presence of the markers, one can identify and/or image specific cell structures.

[0491] In some embodiments, the engineered targeting moieties, polypeptides, polynucleotides, vectors, vector systems, particles, viral (e.g., AAV) particles, cells, or any combination thereof described herein can be used in a screening assay inside or outside of a cell. In some embodiments, the screening assay can include delivering a CRISPR-Cas cargo molecule(s) via engineered targeting moieties, polypeptides, polynucleotides, vectors, vector systems, particles, viral (e.g. AAV) particles, cells, or any combination thereof described herein.

[0492] Use of the present system in screening is also provided by the present invention, e.g., gain of function screens. Cells which are artificially forced to overexpress a gene are able to down regulate the gene over time (re-establishing equilibrium) e.g., by negative feedback loops. By the time the screen starts the unregulated gene might be reduced again. Other screening assays are discussed elsewhere herein.

[0493] In an embodiment, the invention provides a cell from or of an in vitro method of delivery, wherein the method comprises contacting the delivery system with a cell, optionally a eukaryotic cell, whereby there is delivery into the cell of constituents of the delivery system, and optionally obtaining data or results from the contacting, and transmitting the data or results.

[0494] In an embodiment, the invention provides a cell from or of an in vitro method of delivery, wherein the method comprises contacting the delivery system with a cell, optionally a eukaryotic cell, whereby there is delivery into the cell of constituents of the delivery system, and optionally obtaining data or results from the contacting, and transmitting the data or results; and wherein the cell product is altered compared to the cell not contacted with the delivery system, for example altered from that which would have been wild type of the cell but for the contacting. In an embodiment, the cell product is non-human or animal. In some embodiments, the cell product is human.

[0495] In some embodiments, a host cell is transiently or non-transiently transfected with one or more vectors described herein. In some embodiments, a cell is transfected as it naturally occurs in a subject optionally to be reintroduced therein. In some embodiments, a cell that is transfected is taken from a subject. In some embodiments, the cell obtained from or is derived from cells taken from a subject, such as a cell line. Delivery mechanisms and techniques of the targeting moieties, polypeptides, polynucleotides, vectors, vector systems, particles, viral (e.g., AAV) particles, cells, or any combination thereof described herein.

[0496] In some embodiments it is envisaged to introduce one or more of the engineered targeting moieties, polypeptides, polynucleotides, vectors, vector systems, particles, viral (e.g., AAV) particles, cells, or any combination thereof described herein directly to the host cell. For instance, the engineered AAV capsid system molecule(s) can be delivered together with one or more cargo molecules to be packaged into an engineered AAV particle.

[0497] In some embodiments, the invention provides a method of expressing an engineered delivery molecule and cargo molecule to be packaged in an engineered viral (e.g. AAV) particle in a cell that can include the step of introducing the vector according any of the vector delivery systems disclosed herein.

[0498] The invention is further described in the following examples, which do not limit the scope of the invention described in the claims.

[0499] Further embodiments are illustrated in the following Examples which are given for illustrative purposes only and are not intended to limit the scope of the invention.

### EXAMPLES

### Example 1—mRNA Based Detection Methods are More Stringent for Selection of AAV Variants

[0500] FIG. 1 demonstrates the adeno-associated virus (AAV) transduction mechanism, which results in production of mRNA. As is demonstrated in FIG. 1, functional transduction of a cell by an AAV particle can result in the production of an mRNA strand. Non-functional transduction would not produce such a product despite the viral genome being detectable using a DNA-based assay. Thus, mRNA-based detection assays to detect transduction by e.g., an AAV can be more stringent and provide feedback as to the functionality of a virus particle that is able to functionally transduce a cell. FIG. 2 shows a graph that can demonstrate that mRNA-based selection of AAV variants can be more stringent than DNA-based selection. The virus library was expressed under the control of a CMV promoter.

### Example 2—mRNA Based Detection Methods can be Used to Detect AAV Capsid Variants from a Capsid Variant Library

[0501] FIGS. 3A-3B show graphs that can demonstrate a correlation between the virus library and vector genome DNA (FIG. 3A) and mRNA (FIG. 3B) in the liver. FIGS. 4A-4F show graphs that can demonstrate capsid variants expressed at the mRNA level identified in different tissues.

### Example 3—Capsid mRNA Expression can be Driven by Tissue Specific Promoters

[0502] FIGS. 5A-5C show graphs that can demonstrate capsid mRNA expression in different tissues under the control of cell-type specific promoters (as noted on x-axis). CMV was included as an exemplary constitutive promoter. CK8 is a muscle-specific promoter. MHCK7 is a muscle-specific promoter. hSyn is a neuron specific promoter.

### Example 4—Capsid Variant Library Generation, Variant Screening, and Variant Dentification

[0503] Generally, an AAV capsid library can be generated by expressing engineered capsid vectors each containing an engineered AAV capsid polynucleotide previously described in an appropriate AAV producer cell line. See e.g., FIG. 8. This can generate an AAV capsid library that can contain one more desired cell-specific engineered AAV capsid variant. FIG. 7 shows a schematic demonstrating embodiments of generating an AAV capsid variant library, particularly insertion of a random n-mer (n=3-15 amino acids) into a wild-type AAV, e.g., AAV9. In this example, random 7-mers were inserted between aa588-589 of variable region VIII of AAV9 viral protein and used to form the viral genome containing vectors with one variant per vector. As shown in FIG. 8, the capsid variant vector library was used to generate AAV particles where each capsid variant encapsulated its coding sequence as the vector genome. FIG. 9 shows vector maps of representative AAV capsid plasmid library vectors (see e.g., FIG. 8) that can be used in an AAV vector system to generate an AAV capsid variant library. The library can be generated with the capsid variant polynucleotide under the control of a tissue specific promoter or constitutive promoter. The library was also made with capsid variant polynucleotide that included a polyadenylation signal.

[0504] As shown in FIG. 6A the AAV capsid library can be administered to various non-human animals for a first round of mRNA-based selection. As shown in FIG. 1, the transduction process by AAVs and related vectors can result in the production of an mRNA molecule that is reflective of the genome of the virus that transduced the cell. As is at least demonstrated in the Examples herein, mRNA based selection can be more specific and effective to determine a virus particle capable of functionally transducing a cell because it is based on the functional product produced as opposed to just detecting the presence of a virus particle in the cell by measuring the presence of viral DNA.

[0505] As is further shown in FIG. 6A, fter first-round administration, one or more engineered AAV virus particles having a desired capsid variant can then be used to form a filtered AAV capsid library. Desirable AAV virus particles can be identified by measuring the mRNA expression of the capsid variants and determining which variants are highly expressed in the desired cell type(s) as compared to non-desired cells type(s). Those that are highly expressed in the desired cell, tissue, and/or organ type are the desired AAV capsid variant particles. In some embodiments, the AAV capsid variant encoding polynucleotide is under control of a tissue-specific promoter that has selective activity in the desired cell, tissue, or organ.

[0506] The engineered AAV capsid variant particles identified from the first round can then be administered to various non-human animals. In some embodiments, the animals used in the second round of selection and identification are not the same as those animals used for first round selection and identification. Similar to round 1, after administration the top expressing variants in the desired cell, tissue, and/or organ type(s) can be identified by measuring viral mRNA expression in the cells. The top variants identified after round two can then be optionally barcoded and optionally pooled. In some embodiments, top variants from the second round can then be administered to a non-human primate to identify the top cell-specific variant(s), particularly if the end use for the top variant is in humans. Administration at each round can be systemic. As further shown in FIG. 6B after the second round of selection, a third round of selection, which can optionally include benchmarking against known, control, and/or standard (e.g., benchmark) variants can be performed.

[0507] FIG. 10 shows a graph that can demonstrate the viral titer (calculated as AAV9 vector genome/15 cm dish) produced by libraries generated using different promoters. As demonstrated in FIG. 10, virus titer was not affected significantly be the use of different promoters.

### Example 5—Motif Variants Having Muscle Specificity or Both Muscle and CNS Specificity

[0508] As shown in FIGS. 6A-6B shows a general schematic for selecting CNS specific capsid, which includes a benchmarking round which evaluates the performance of selected capsids against currently used capsids for, e.g., delivery to the CNS. Tables 4-11 shows the top ranking capsid variants produced in rounds of directed evolution of capsid variants for skeletal muscle specificity, cardiac muscle specificity, CNS and Cardiac muscle septicity, or CNS and skeletal muscle specificity in NHPs. As shown in the Tables below with at least respect to those variant n-mer inserts containing P-motifs the first three amino acids of the variant sequences shown are amino acids that replaced amino acids corresponding to positions 596, 597, and 598 of an AAV9 capsid polypeptide. Thus, the P-motif, for example, was inserted between amino acids at positions 598 and 599 of the AAV9 vector.

TABLE 4
Top Ranking Skeletal Muscle Specific n-mer
inserts and/or RGD Motifs

| Variant | SEQ ID NO: |
|---|---|
| TTGRGDQARL | 4 |
| TTLRGDHSQL | 5 |
| TNLRGDYQLT | 6 |
| STSRGDYVTH | 7 |
| MPARGDLVQT | 8 |
| SGVRGDRLAV | 9 |
| SNERGDQHRL | 10 |
| STLRGDYAVS | 11 |
| SNARGDIMTT | 12 |
| EASRGDLQMR | 13 |
| TYARGDLSGH | 14 |
| DSSRGDRSSV | 15 |
| SQSRGDLVPL | 16 |
| SATRGDYSIL | 17 |
| QATRGDLQHT | 18 |
| HDDRGDRRML | 19 |
| SSHRGDLLAT | 20 |
| SYQRGDQHNM | 21 |
| SHQRGDYNTL | 22 |
| MDQRGDMSVV | 23 |
| QIARGDLHVP | 24 |
| TYTRGDQHMM | 25 |
| DASRGDRTSL | 26 |
| SDRRGDLHPQ | 27 |
| SATRGDHSTL | 28 |
| AYQRGDFTSV | 29 |
| TGNRGDLQSV | 30 |
| AWRRGDLENA | 31 |
| NAARGDHGLL | 32 |
| SYSRGDHQAL | 33 |
| DGVRGDRTVV | 34 |
| SSERGDKMST | 35 |
| TSMRGDYTHV | 36 |
| SGVRGDRIII | 37 |
| ENRRGDAQLL | 38 |
| TVYRGDREQH | 39 |
| LDRRGDLLNS | 40 |
| ESVRGDLRST | 41 |
| DKYRGDQRGL | 42 |
| TDRRGDAHIL | 43 |
| SQTRGDTSLM | 44 |
| DATRGDTRML | 45 |
| SMQRGDLTHA | 46 |
| SGTRGDTLIL | 47 |
| ANTRGDHQNF | 48 |
| TSQRGDHTQL | 49 |
| SHWRGDTSSL | 50 |
| ISGRGDRQEL | 51 |
| SVLRGDIGTI | 52 |
| QDSRGDLSGK | 53 |
| KPIRGDGAEL | 54 |
| TYMRGDLQHT | 55 |
| TELRGDLSST | 56 |
| SAMRGDHAVL | 57 |
| SWVRGDASTL | 58 |
| QYARGDPHAL | 59 |
| STNRGDIVVH | 60 |
| VNIRGDLHQT | 61 |
| REYRGDSSIL | 62 |
| STLRGDGSMM | 63 |
| SSQRGDITAH | 64 |
| TEFRGDRSTV | 65 |
| TSTRGDYVTV | 66 |
| NHLRGDVSAI | 67 |
| LERRGDLVST | 68 |
| NEYRGDHSHP | 69 |
| NWQRGDTSTL | 70 |
| TDSRGDRTVL | 71 |
| YAVRGDQHTI | 72 |
| FGVRGDTRDL | 73 |
| SSARGDTGML | 74 |
| SAMRGDQMGQ | 75 |
| SHTRGDLVTT | 76 |
| VTTRGDTAIL | 77 |
| EPTRGDRHSI | 78 |
| GSQRGDRLVL | 79 |
| QHYRGDLSTT | 80 |
| METRGDRQQL | 81 |
| EALRGDKVVL | 82 |
| NAVRGDQSYV | 83 |
| SPLRGDNRAL | 84 |
| ENRRGDTHAL | 85 |
| NSQRGDLTGT | 86 |
| QYAPSQGTV | 87 |
| DNSRGDHSRL | 88 |
| NTHRGDYASI | 89 |
| HTTRGDQQPL | 90 |
| EWRRGDQTAL | 91 |
| TAVRGDQTTV | 92 |
| EYLRGDRISQ | 93 |
| SRYRGDQETI | 94 |
| ASLRGDTVTL | 95 |
| VGVRGDSHVL | 96 |
| TNSRGDHTSL | 97 |
| VDQRGDQRAL | 98 |
| ASVRGDRLDV | 99 |
| TSYRGDLSSN | 100 |
| TSDRGDSSNR | 101 |
| SYMRGDLDMR | 102 |
| TDVRGDRSMI | 103 |
| SYVRGDSSTV | 104 |
| QVYRGDRESV | 105 |
| TDRRGDAVSF | 106 |
| TNSRGDLHTT | 107 |
| EAIRGDFKTL | 108 |
| TGIRGDTAGL | 109 |
| TSSRGDVQSL | 110 |
| SSRRGDTNEL | 111 |
| SNARGDHTPL | 112 |
| SELRGDRSPY | 113 |
| VHARGDTSIM | 114 |
| SALRGDHGTL | 115 |
| QTGRGDIAGM | 116 |
| TVARGDQIRL | 117 |
| TNSRGDSVAL | 118 |
| QNARGDSAVI | 119 |
| HYLRGDTTTL | 120 |
| ANARGDLQNT | 121 |
| QNIRGDIRTV | 122 |
| AALRGDHGQM | 123 |
| TTDRGDLSAR | 124 |
| LNVRGDLVHT | 125 |
| YSTRGDHTVL | 126 |
| TNARGDLTVS | 127 |
| TNARGDYTAL | 128 |
| AEGRGDTRGS | 129 |
| TNIRGDQSSV | 130 |
| VDRRGDTMTM | 131 |
| QIGRGDVTPL | 132 |
| MQARGDLLGV | 133 |
| NTQRGDYASV | 134 |
| SDTRGDRITQ | 135 |
| SAIRGDYRDV | 136 |
| VGVRGDVHPL | 137 |
| TVLRGDAERL | 138 |
| ASTRGDLSGQ | 139 |
| DSRRGDGQNL | 140 |
| IDKRGDIQGL | 141 |
| TVTRGDLLVN | 142 |
| DSTRGDRLGL | 143 |
| AANRGDYASL | 144 |
| RDYRGDTSSL | 145 |
| SNIRGDASLH | 146 |
| NLQRGDRTDF | 147 |
| NASRGDHSSM | 148 |
| TSMRGDYTHV | 149 |
| TSRRGDLNDV | 150 |
| QSHRGDVQSL | 151 |
| STTRGDYQSV | 152 |
| YSTRGDHAML | 153 |
| TSARGDLIHT | 154 |
| ATARGDRESF | 155 |
| ASTRGDYSTM | 156 |
| SNNRGDVQRL | 157 |
| ERLRGDQHII | 158 |
| SSIRGDHATL | 159 |
| NPTRGDIATV | 160 |
| MSTRGDLSVN | 161 |
| MDRRGDITYA | 162 |
| NATRGDLMSA | 163 |
| SDHRGDRTYQ | 164 |
| NWVRGDLSTA | 165 |
| SSHRGDLSAT | 166 |
| NATRGDYREI | 167 |
| DTLRGDLQTA | 168 |
| IAVRGDLTPV | 169 |
| TLLRGDLAHS | 170 |
| MNTRGDHTVL | 171 |
| TGHRGDIAVY | 172 |
| TSNRGDQMSN | 173 |
| SATRGDHTAI | 174 |
| SSVRGDREHA | 175 |
| TNSRGDLVVH | 176 |
| ETRRGDLSSQ | 177 |
| TYARGDITLT | 178 |
| SASRGDTLHL | 179 |
| DNQRGDLSSR | 180 |
| TQSRGDLRDA | 181 |
| ENRRGDLTNA | 182 |
| TSIRGDISSV | 183 |
| ISARGDTMTL | 184 |
| SRVRGDQDHW | 185 |
| SGNRGDIASY | 186 |
| NEQRGDRYNH | 187 |
| EALRGDVRAL | 188 |
| VDRRGDYTQM | 189 |
| NNVRGDYTSV | 190 |
| QTYRGDASVL | 191 |
| SNYRGDHGSL | 192 |
| TSSRGDLREV | 193 |
| QYTRGDVSNL | 194 |
| SDLRGDVRER | 195 |
| QNARGDTTAL | 196 |
| NSLRGDRDTM | 197 |
| SNSRGDQAQV | 198 |
| EATRGDRSTL | 199 |
| VPQRGDITNL | 200 |
| DKIRGDLRSI | 201 |
| SAARGDYSIV | 202 |
| VGLRGDLIGQ | 203 |
| QAGRGDLTVI | 204 |
| SKTRGDFQEA | 205 |
| GTARGDYSML | 206 |
| ISTRGDLVTI | 207 |
| TGTRGDREYM | 208 |
| MTTRGDLSIT | 209 |
| STSRGDMTSV | 210 |
| GPARGDFTSS | 211 |
| VDRRGDLGHV | 212 |
| NSGRGDMSQL | 213 |
| SQGRGDLERY | 214 |
| VFGRGDQYTL | 215 |
| IVGRGDLHLQ | 216 |
| SYSRGDTSRL | 217 |
| MSSRGDRATI | 218 |
| MSSRGDLTRV | 219 |
| QHTRGDFGNL | 220 |
| ETRRGDLSSQ | 221 |
| TGTRGDLRAI | 222 |
| QMARGDLSTA | 223 |
| LVERGDRIMN | 224 |
| GLVRGDLNAR | 225 |
| NNPRGDLSSV | 226 |
| HEKRGDLSNS | 227 |
| SQARGDLHQT | 228 |
| FTGRGDLRTA | 229 |
| QSIRGDTGHL | 230 |
| SAGRGDMSVL | 231 |
| SERRGDEHKW | 232 |
| TTGRGDLVSL | 233 |
| LGLRGDQIGQ | 234 |
| VALRGDLTHQ | 235 |
| MIGRGDQAPL | 236 |
| FQARGDHSTL | 237 |
| NSVRGDHSSL | 238 |
| WPNRGDLQST | 239 |
| SASRGDYQTL | 240 |
| TMQRGDLHTI | 241 |
| TALRGDLAGT | 242 |
| VNARGDFSQT | 243 |
| GWIRGDRTSM | 244 |
| TFSRGDHTVL | 245 |
| SGARGDLVGV | 246 |
| NNVRGDYTSV | 247 |
| QTARGDHVVL | 248 |
| TLIRGDLTRS | 249 |
| VTTRGDRLEL | 250 |

TABLE 5
Top Ranking Skeletal Muscle Specific n-mer
inserts and/or RGD Motifs

| Variant | SEQ ID NO: |
|---|---|
| EASRGDLQMR | 251 |
| TYARGDLSGH | 252 |
| DSSRGDRSSV | 253 |
| SQSRGDLVPL | 254 |
| MPARGDLVQT | 255 |
| SGVRGDRLAV | 256 |
| SNERGDQHRL | 257 |
| STLRGDYAVS | 258 |
| SNARGDIMTT | 259 |
| TTGRGDQARL | 260 |
| TTLRGDHSQL | 261 |
| TNLRGDYQLT | 262 |
| STSRGDYVTH | 263 |
| SATRGDYSIL | 264 |
| QATRGDLQHT | 265 |
| HDDRGDRRML | 266 |
| SSHRGDLLAT | 267 |
| SYQRGDQHNM | 268 |
| SHQRGDYNTL | 269 |
| MDQRGDMSVV | 270 |
| QIARGDLHVP | 271 |
| TYTRGDQHMM | 272 |
| DASRGDRTSL | 273 |
| SDRRGDLHPQ | 274 |
| SATRGDHSTL | 275 |
| AYQRGDFTSV | 276 |
| TGNRGDLQSV | 277 |
| AWRRGDLENA | 278 |
| NAARGDHGLL | 279 |
| SYSRGDHQAL | 280 |
| DGVRGDRTVV | 281 |
| SSERGDKMST | 282 |
| TSMRGDYTHV | 283 |
| SGVRGDRIII | 284 |
| ENRRGDAQLL | 285 |
| TVYRGDREQH | 286 |
| LDRRGDLLNS | 287 |
| ESVRGDLRST | 288 |
| DKYRGDQRGL | 289 |
| TDRRGDAHIL | 290 |
| SQTRGDTSLM | 291 |
| DATRGDTRML | 292 |
| SMQRGDLTHA | 293 |
| SGTRGDTLIL | 294 |
| ANTRGDHQNF | 295 |
| TSQRGDHTQL | 296 |
| SHWRGDTSSL | 297 |
| ISGRGDRQEL | 298 |
| SVLRGDIGTI | 299 |
| QDSRGDLSGK | 300 |
| KPIRGDGAEL | 301 |
| TYMRGDLQHT | 302 |
| TELRGDLSST | 303 |
| SAMRGDHAVL | 304 |
| SWVRGDASTL | 305 |
| QYARGDPHAL | 306 |
| STNRGDIVVH | 307 |
| VNIRGDLHQT | 308 |
| REYRGDSSIL | 309 |
| STLRGDGSMM | 310 |
| SSQRGDITAH | 311 |
| TEFRGDRSTV | 312 |
| TSTRGDYVTV | 313 |
| NHLRGDVSAI | 314 |
| LERRGDLVST | 315 |
| NEYRGDHSHP | 316 |
| NWQRGDTSTL | 317 |
| TDSRGDRTVL | 318 |
| YAVRGDQHTI | 319 |
| FGVRGDTRDL | 320 |
| SSARGDTGML | 321 |
| SAMRGDQMGQ | 322 |
| SHTRGDLVTT | 323 |
| VTTRGDTAIL | 324 |
| EPTRGDRHSI | 325 |
| GSQRGDRLVL | 326 |
| QHYRGDLSTT | 327 |
| METRGDRQQL | 328 |
| EALRGDKVVL | 329 |
| NAVRGDQSYV | 330 |
| SPLRGDNRAL | 331 |
| ENRRGDTHAL | 332 |
| NSQRGDLTGT | 333 |
| DNSRGDHSRL | 334 |
| NTHRGDYASI | 335 |
| HTTRGDQQPL | 336 |
| EWRRGDQTAL | 337 |
| TAVRGDQTTV | 338 |
| EYLRGDRISQ | 339 |
| SRYRGDQETI | 340 |
| ASLRGDTVTL | 341 |
| VGVRGDSHVL | 342 |
| TNSRGDHTSL | 343 |
| VDQRGDQRAL | 344 |
| ASVRGDRLDV | 345 |
| TSYRGDLSSN | 346 |
| TSDRGDSSNR | 347 |
| SYMRGDLDMR | 348 |
| TDVRGDRSMI | 349 |
| SYVRGDSSTV | 350 |
| QVYRGDRESV | 351 |
| TDRRGDAVSF | 352 |
| TNSRGDLHTT | 353 |
| EAIRGDFKTL | 354 |
| TGIRGDTAGL | 355 |
| TSSRGDVQSL | 356 |
| SSRRGDTNEL | 357 |
| SNARGDHTPL | 358 |
| SELRGDRSPY | 359 |
| VHARGDTSIM | 360 |
| SALRGDHGTL | 361 |
| QTGRGDIAGM | 362 |
| TVARGDQIRL | 363 |
| TNSRGDSVAL | 364 |
| QNARGDSAVI | 365 |
| HYLRGDTTTL | 366 |
| ANARGDLQNT | 367 |
| QNIRGDIRTV | 368 |
| AALRGDHGQM | 369 |
| TTDRGDLSAR | 370 |
| LNVRGDLVHT | 371 |
| YSTRGDHTVL | 372 |
| TNARGDLTVS | 373 |
| TNARGDYTAL | 374 |
| AEGRGDTRGS | 375 |
| TNIRGDQSSV | 376 |
| VDRRGDTMTM | 377 |
| QIGRGDVTPL | 378 |
| MQARGDLLGV | 379 |
| NTQRGDYASV | 380 |
| SDTRGDRITQ | 381 |
| SAIRGDYRDV | 382 |
| VGVRGDVHPL | 383 |
| TVLRGDAERL | 384 |
| ASTRGDLSGQ | 385 |
| DSRRGDGQNL | 386 |
| IDKRGDIQGL | 387 |
| TVTRGDLLVN | 388 |
| DSTRGDRLGL | 389 |
| AANRGDYASL | 390 |
| RDYRGDTSSL | 391 |
| SNIRGDASLH | 392 |
| NLQRGDRTDF | 393 |
| NASRGDHSSM | 394 |
| TSMRGDYTHV | 395 |
| TSRRGDLNDV | 396 |
| QSHRGDVQSL | 397 |
| STTRGDYQSV | 398 |
| YSTRGDHAML | 399 |
| TSARGDLIHT | 400 |
| ATARGDRESF | 401 |
| ASTRGDYSTM | 402 |
| SNNRGDVQRL | 403 |
| ERLRGDQHII | 404 |
| SSIRGDHATL | 405 |
| NPTRGDIATV | 406 |
| MSTRGDLSVN | 407 |
| MDRRGDITYA | 408 |
| NATRGDLMSA | 409 |
| SDHRGDRTYQ | 410 |
| NWVRGDLSTA | 411 |
| SSHRGDLSAT | 412 |
| NATRGDYREI | 413 |
| DTLRGDLQTA | 414 |
| IAVRGDLTPV | 415 |
| TLLRGDLAHS | 416 |
| MNTRGDHTVL | 417 |
| TGHRGDIAVY | 418 |
| TSNRGDQMSN | 419 |
| SATRGDHTAI | 420 |
| SSVRGDREHA | 421 |
| TNSRGDLVVH | 422 |
| ETRRGDLSSQ | 423 |
| TYARGDITLT | 424 |
| SASRGDTLHL | 425 |
| DNQRGDLSSR | 426 |
| TQSRGDLRDA | 427 |
| ENRRGDLTNA | 428 |
| TSIRGDISSV | 429 |
| ISARGDTMTL | 430 |
| SRVRGDQDHW | 431 |
| SGNRGDIASY | 432 |
| NEQRGDRYNH | 433 |
| EALRGDVRAL | 434 |
| VDRRGDYTQM | 435 |
| NNVRGDYTSV | 436 |
| QTYRGDASVL | 437 |
| SNYRGDHGSL | 438 |
| TSSRGDLREV | 439 |
| QYTRGDVSNL | 440 |
| SDLRGDVRER | 441 |
| QNARGDTTAL | 442 |
| NSLRGDRDTM | 443 |
| SNSRGDQAQV | 444 |
| EATRGDRSTL | 445 |
| VPQRGDITNL | 446 |
| DKIRGDLRSI | 447 |
| SAARGDYSIV | 448 |
| VGLRGDLIGQ | 449 |
| QAGRGDLTVI | 450 |
| SKTRGDFQEA | 451 |
| GTARGDYSML | 452 |
| ISTRGDLVTI | 453 |
| TGTRGDREYM | 454 |
| MTTRGDLSIT | 455 |
| STSRGDMTSV | 456 |
| GPARGDFTSS | 457 |
| VDRRGDLGHV | 458 |
| NSGRGDMSQL | 459 |
| SQGRGDLERY | 460 |
| VFGRGDQYTL | 461 |
| IVGRGDLHLQ | 462 |
| SYSRGDTSRL | 463 |
| MSSRGDRATI | 464 |
| MSSRGDLTRV | 465 |
| QHTRGDFGNL | 466 |
| ETRRGDLSSQ | 467 |
| TGTRGDLRAI | 468 |
| QMARGDLSTA | 469 |
| LVERGDRIMN | 470 |
| GLVRGDLNAR | 471 |
| NNPRGDLSSV | 472 |
| HEKRGDLSNS | 473 |
| SQARGDLHQT | 474 |
| FTGRGDLRTA | 475 |
| QSIRGDTGHL | 476 |
| SAGRGDMSVL | 477 |
| SERRGDEHKW | 478 |
| TTGRGDLVSL | 479 |
| LGLRGDQIGQ | 480 |
| VALRGDLTHQ | 481 |
| MIGRGDQAPL | 482 |
| FQARGDHSTL | 483 |
| NSVRGDHSSL | 484 |
| WPNRGDLQST | 485 |
| SASRGDYQTL | 486 |
| TMQRGDLHTI | 487 |
| TALRGDLAGT | 488 |
| VNARGDFSQT | 489 |
| GWIRGDRTSM | 490 |
| TFSRGDHTVL | 491 |
| SGARGDLVGV | 492 |
| NNVRGDYTSV | 493 |
| QTARGDHVVL | 494 |
| TLIRGDLTRS | 495 |
| VTTRGDRLEL | 496 |

TABLE 6
Top Ranking Cardiac Muscle Specific n-mer
inserts and/or RGD Motifs

| Variant | SEQ ID NO: |
|---|---|
| EARRGDLQSP | 497 |
| SSSRGDRLEL | 498 |
| SSLRGDKDHL | 499 |
| ESLRGDVGAR | 500 |
| TSSRGDVQSL | 501 |
| LQSRGDVERQ | 502 |
| IDRRGDGHSL | 503 |
| QATRGDHAVV | 504 |
| QQTRGDLLPT | 505 |
| INVRGDYSST | 506 |
| YAYRGDTHNL | 507 |
| KPTRGDTATT | 508 |
| NERRGDHLGL | 509 |
| DRGRGDSTQG | 510 |
| MPARGDLVQT | 511 |
| QASRGDLQAS | 512 |
| LALRGDGALT | 513 |
| MERRGDQTQV | 514 |
| ITLRGDRDFP | 515 |
| TAARGDYIGM | 516 |
| EARRGDGVNV | 517 |
| SSGRGDTAGV | 518 |
| AISRGDTESV | 519 |
| MLIRGDHSAA | 520 |
| MKGRGDITDP | 521 |
| RNVRGDSDTT | 522 |
| LPYRGDTAYA | 523 |
| SNSRGDAQSK | 524 |
| TNQRGDRTEM | 525 |
| TEKRGDISGT | 526 |
| GSYRGDERQL | 527 |
| AGFRGDANAL | 528 |
| QYRRGDASLI | 529 |
| MLGRGDTLAL | 530 |
| VINRGDTTYS | 531 |
| EQLRGDLSNR | 532 |
| SHQRGDNPLY | 533 |
| SSIRGDMVRI | 534 |
| VHVRGDMATT | 535 |
| KDRRGDQTEY | 536 |
| TKQRGDTENY | 537 |
| SGERGDSMGL | 538 |
| TLARGDPKDA | 539 |
| MSVRGDLSTS | 540 |
| GYQRGDAMKL | 541 |
| DSSRGDRLSV | 542 |
| VNKRGDANEL | 543 |
| NERRGDSLYM | 544 |
| CAARGDLTNS | 545 |
| TTSRGDQYEK | 546 |
| ERTRGDIATQ | 547 |
| AAMRGDLSTT | 548 |
| TALRGDYAST | 549 |
| ASTRGDMSSS | 550 |
| AVGRGDSLRL | 551 |
| TRERGDTGHP | 552 |
| KYSRGDLSGE | 553 |
| SEVRGDILRS | 554 |
| MNKRGDHETQ | 555 |
| ASSRGDYDRV | 556 |
| SQLRGDNASS | 557 |
| NATRGDSGVT | 558 |
| STTRGDRMET | 559 |
| ASSRGDTSYL | 560 |
| DRTRGDLQSS | 561 |
| SNTRGDVVVT | 562 |
| ENARGDRTAM | 563 |
| NTNRGDATLH | 564 |
| HPGRGDSPTS | 565 |
| TSHRGDTLTT | 566 |
| KAPRGDNLPT | 567 |
| NMVRGDRDVL | 568 |
| GTSRGDFANV | 569 |
| ENKRGDVQQM | 570 |
| TANRGDTSSL | 571 |
| QSYRGDMSAS | 572 |
| NSARGDRLEL | 573 |
| TSNRGDRETF | 574 |
| SGVRGDVSVH | 575 |
| VTSRGDTASL | 576 |
| TGARGDTTVV | 577 |
| LVLRGDVRVM | 578 |
| SSARGDISGI | 579 |
| SNGRGDLHGS | 580 |
| VTGRGDTQYL | 581 |
| VVNRGDRTFN | 582 |
| LDKRGDPQWQ | 583 |
| QYRRGDYELS | 584 |
| VLPRGDQIIA | 585 |
| TSTRGDAAIV | 586 |
| TVFRGDRGND | 587 |
| SDSRGDTRGL | 588 |
| KDRRGDQTEY | 589 |
| TQLRGDLHPQ | 590 |
| MNGRGDASHI | 591 |
| WQSRGDRTIS | 592 |
| QDSRGDLSGK | 593 |
| SSARGDRADA | 594 |
| SSTRGDLTVN | 595 |
| ISPRGDSGGI | 596 |
| ANLRGDLHTP | 597 |
| TSSRGDLHFT | 598 |
| AATRGDTQTH | 599 |
| RDARGDLANS | 600 |
| YPHRGDQIMV | 601 |
| AGQRGDNWAQ | 602 |
| SARRGDQLEM | 603 |
| STGRGDQKLL | 604 |
| SLGRGDVSMV | 605 |
| ANERGDVSVL | 606 |
| SSIRGDLKLA | 607 |
| YSLRGDQHSS | 608 |
| STVRGDRAIT | 609 |
| HNSRGDPLGQ | 610 |
| RETRGDSSSF | 611 |
| VDKRGDLVLA | 612 |
| CNSRGDTQFL | 613 |
| TTARGDASQT | 614 |
| KMDRGDMAVS | 615 |
| KPTRGDTEHL | 616 |
| QYARGDPHAL | 617 |
| SSARGDTVAF | 618 |
| SERRGDLAPN | 619 |
| KFLRGDAGSS | 620 |
| QFNRGDQQRL | 621 |
| KFVRGDTLLP | 622 |
| EQRRGDHSAL | 623 |
| ADLRGDLRQS | 624 |
| SRVRGDRLED | 625 |
| SMTRGDTLRL | 626 |
| MSNRGDLREI | 627 |
| MLHRGDRMAV | 628 |
| NLQRGDRIPL | 629 |
| SSTRGDRLIS | 630 |
| EERRGDTHRL | 631 |
| MDKRGDQTIH | 632 |
| STKRGDLLSG | 633 |
| LIDRGDRMER | 634 |
| GRVRGDIVVV | 635 |
| DKLRGDLRLQ | 636 |
| NPTRGDNIGY | 637 |
| ELRRGDSANT | 638 |
| TAHRGDTSSI | 639 |
| HSTRGDRHLD | 640 |
| SATRGDLLST | 641 |
| TSSRGDSHAL | 642 |
| DANRGDLRDK | 643 |
| IDRRGDVRDM | 644 |
| TGTRGDLSTT | 645 |
| SNSRGDVALV | 646 |
| SYTRGDQHGL | 647 |

TABLE 7
Top Ranking Cardiac Muscle Specific n-mer
inserts and/or RGD Motifs

| Variant | SEQ ID NO.: |
|---|---|
| EARRGDLQSP | 648 |
| SSSRGDRLEL | 649 |
| SSLRGDKDHL | 650 |
| ESLRGDVGAR | 651 |
| TSSRGDVQSL | 652 |
| LQSRGDVERQ | 653 |
| IDRRGDGHSL | 654 |
| QATRGDHAVV | 655 |
| QQTRGDLLPT | 656 |
| INVRGDYSST | 657 |
| YAYRGDTHNL | 658 |
| KPTRGDTATT | 659 |
| NERRGDHLGL | 660 |
| DRGRGDSTQG | 661 |
| MPARGDLVQT | 662 |
| QASRGDLQAS | 663 |
| LALRGDGALT | 664 |
| MERRGDQTQV | 665 |
| ITLRGDRDFP | 666 |
| TAARGDYIGM | 667 |
| EARRGDGVNV | 668 |
| SSGRGDTAGV | 669 |
| AISRGDTESV | 670 |
| MLIRGDHSAA | 671 |
| MKGRGDITDP | 672 |
| RNVRGDSDTT | 673 |
| LPYRGDTAYA | 674 |
| SNSRGDAQSK | 675 |
| TNQRGDRTEM | 676 |
| TEKRGDISGT | 677 |
| GSYRGDERQL | 678 |
| AGFRGDANAL | 679 |
| QYRRGDASLI | 680 |
| MLGRGDTLAL | 681 |
| VINRGDTTYS | 682 |
| EQLRGDLSNR | 683 |
| SHQRGDNPLY | 684 |
| SSIRGDMVRI | 685 |
| VHVRGDMATT | 686 |
| KDRRGDQTEY | 687 |
| TKQRGDTENY | 688 |
| SGERGDSMGL | 689 |
| TLARGDPKDA | 690 |
| MSVRGDLSTS | 691 |
| GYQRGDAMKL | 692 |
| DSSRGDRLSV | 693 |
| VNKRGDANEL | 694 |
| NERRGDSLYM | 695 |
| CAARGDLTNS | 696 |
| TTSRGDQYEK | 697 |
| ERTRGDIATQ | 698 |
| AAMRGDLSTT | 699 |
| TALRGDYAST | 700 |
| ASTRGDMSSS | 701 |
| AVGRGDSLRL | 702 |
| TRERGDTGHP | 703 |
| KYSRGDLSGE | 704 |
| SEVRGDILRS | 705 |
| MNKRGDHETQ | 706 |
| ASSRGDYDRV | 707 |
| SQLRGDNASS | 708 |
| NATRGDSGVT | 709 |
| STTRGDRMET | 710 |
| ASSRGDTSYL | 711 |
| DRTRGDLQSS | 712 |
| SNTRGDVVVT | 713 |
| ENARGDRTAM | 714 |
| NTNRGDATLH | 715 |
| HPGRGDSPTS | 716 |
| TSHRGDTLTT | 717 |
| KAPRGDNLPT | 718 |
| NMVRGDRDVL | 719 |
| GTSRGDFANV | 720 |
| ENKRGDVQQM | 721 |
| TANRGDTSSL | 722 |
| QSYRGDMSAS | 723 |
| NSARGDRLEL | 724 |
| TSNRGDRETF | 725 |
| SGVRGDVSVH | 726 |
| VTSRGDTASL | 727 |
| TGARGDTTVV | 728 |
| LVLRGDVRVM | 729 |
| SSARGDISGI | 730 |
| SNGRGDLHGS | 731 |
| VTGRGDTQYL | 732 |
| VVNRGDRTFN | 733 |
| LDKRGDPQWQ | 734 |
| QYRRGDYELS | 735 |
| VLPRGDQIIA | 736 |
| TSTRGDAAIV | 737 |
| TVFRGDRGND | 738 |
| SDSRGDTRGL | 739 |
| KDRRGDQTEY | 740 |
| TQLRGDLHPQ | 741 |
| MNGRGDASHI | 742 |
| WQSRGDRTIS | 743 |
| QDSRGDLSGK | 744 |
| SSARGDRADA | 745 |
| SSTRGDLTVN | 746 |
| ISPRGDSGGI | 747 |
| ANLRGDLHTP | 748 |
| TSSRGDLHFT | 749 |
| AATRGDTQTH | 750 |
| RDARGDLANS | 751 |
| YPHRGDQIMV | 752 |
| AGQRGDNWAQ | 753 |
| SARRGDQLEM | 754 |
| STGRGDQKLL | 755 |
| SLGRGDVSMV | 756 |
| ANERGDVSVL | 757 |
| SSIRGDLKLA | 758 |
| YSLRGDQHSS | 759 |
| STVRGDRAIT | 760 |
| HNSRGDPLGQ | 761 |
| RETRGDSSSF | 762 |
| VDKRGDLVLA | 763 |
| CNSRGDTQFL | 764 |
| TTARGDASQT | 765 |
| KMDRGDMAVS | 766 |
| KPTRGDTEHL | 767 |
| QYARGDPHAL | 768 |
| SSARGDTVAF | 769 |
| SERRGDLAPN | 770 |
| KFLRGDAGSS | 771 |
| QFNRGDQQRL | 772 |
| KFVRGDTLLP | 773 |
| EQRRGDHSAL | 774 |
| ADLRGDLRQS | 775 |
| SRVRGDRLED | 776 |
| SMTRGDTLRL | 777 |
| MSNRGDLREI | 778 |
| MLHRGDRMAV | 779 |
| NLQRGDRIPL | 780 |
| SSTRGDRLIS | 781 |
| EERRGDTHRL | 782 |
| MDKRGDQTIH | 783 |
| STKRGDLLSG | 784 |
| LIDRGDRMER | 785 |
| GRVRGDIVVV | 786 |
| DKLRGDLRLQ | 787 |
| NPTRGDNIGY | 788 |
| ELRRGDSANT | 789 |
| TAHRGDTSSI | 790 |
| HSTRGDRHLD | 791 |
| SATRGDLLST | 792 |
| TSSRGDSHAL | 793 |
| DANRGDLRDK | 794 |
| IDRRGDVRDM | 795 |
| TGTRGDLSTT | 796 |
| SNSRGDVALV | 797 |
| SYTRGDQHGL | 798 |

TABLE 8
Top Ranking n-mer inserts, P-motifs,
and/or RGD motifs having CNS
and Skeletal Muscle Specificity

| Variant | SEQ ID NO: |
|---|---|
| GVLPQQGTPR | 799 |
| SERPEQGTQR | 800 |
| MTVPNQGTNR | 801 |
| NNTPSQGTSR | 802 |
| SRDPPQGTTR | 803 |
| GTVPSQGTSR | 804 |
| SFLPNQGTAR | 805 |
| SGDPSQGTYR | 806 |
| SREPNQGTPR | 807 |
| NSEPYQGTQR | 808 |
| IEGPTQGTSR | 809 |
| SSLPGQGTMR | 810 |
| STAPVQGTNR | 811 |
| DYSPGQGTVR | 812 |
| GSVPAQGTTR | 813 |
| NTNPDQGTMR | 814 |
| DDSPRQGTMR | 815 |
| SGQPEQGTAR | 816 |
| ERTPVQGTDR | 817 |
| ASTPSQGTER | 818 |
| GAVPTQGTPR | 819 |
| AGTPVQGTSR | 820 |
| NVNPNQGTDR | 821 |
| AREPVQGTVR | 822 |
| SSVPKQGTER | 823 |
| ESRPNQGTDR | 824 |
| EGVPIQGTHR | 825 |
| SKDPVQGTVR | 826 |
| MEPPHQGTGR | 827 |
| AISPNQGTTR | 828 |
| TRDPGQGTNR | 829 |
| QASPVQGTTR | 830 |
| GAHPSQGTDR | 831 |
| GYQPAQGTGR | 832 |
| MDNPLQGTLR | 833 |
| MSVPPQGTGR | 834 |
| SATPPQGTNR | 835 |
| NNGPDQGTNR | 836 |
| TDGPGQGTSR | 837 |
| SGNPTQGTMR | 838 |
| MEGPSQGTMR | 839 |
| TADPYQGTGR | 840 |
| AMNPVQGTPR | 841 |
| ADSPQQGTLR | 842 |
| TQVPTQGTVR | 843 |
| RGDPIQGTLR | 844 |
| SGPPYQGTER | 845 |
| TSNPVQGTGR | 846 |
| IVSPVQGTTR | 847 |
| AGEPMQGTVR | 848 |
| SGEPNQGTLR | 849 |
| STTPLQGTTR | 850 |
| GDEPRQGTTR | 851 |
| EMGPRQGTDR | 852 |
| GTTPMQGTSR | 853 |
| GQKPDQGTVR | 854 |
| TAIPSQGTSR | 855 |
| SVLPSQGTQR | 856 |
| SYNPSQGTVR | 857 |
| DAKPSQGTSR | 858 |
| MMAPLQGTDR | 859 |
| AEHPVQGTMR | 860 |
| SASPVQGTSR | 861 |
| ETNPRQGTDR | 862 |
| ALLPTQGTAR | 863 |
| GEAPSQGTNR | 864 |
| SWEPRQGTDR | 865 |
| WVSPKQGTER | 866 |
| YDGPSQGTSR | 867 |
| GTQPTQGTSR | 868 |
| NEVPRQGTPR | 869 |
| GSTPMQGTAR | 870 |
| LPRPVQGTDR | 871 |
| HALPSQGTDR | 872 |
| SWDPSQGTIR | 873 |
| TQLPTQGTIR | 874 |
| AVYPEQGTSR | 875 |
| NETPTQGTTR | 876 |
| QTGPTQGTER | 877 |
| TQVPTQGTVR | 878 |
| TMGPNQGTTR | 879 |
| GTMPDQGTLR | 880 |
| SESPVQGTVR | 881 |
| TVTPVQGTSR | 882 |
| REYPIQGTER | 883 |
| WYEPKQGTAR | 884 |
| AENPROGTER | 885 |
| STSPIQGTTR | 886 |
| TMSPPQGTGR | 887 |
| MEHPYQGTGR | 888 |
| EAYPKQGTER | 889 |
| TTEPTQGTQR | 890 |
| EVGPTQGTTR | 891 |
| NSTPDQGTHR | 892 |
| DAQPKQGTGR | 893 |
| SGVPVQGTVR | 894 |
| NGEPLQGTMR | 895 |
| VSVPGQGTLR | 896 |
| EFAPSQGTAR | 897 |
| DGNPQQGTGR | 898 |
| QNMPLQGTGR | 899 |
| WLGPNQGTDR | 900 |
| SSMPVQGTDR | 901 |
| EGAPGQGTGR | 902 |
| MVNPIQGTGR | 903 |
| SDMPGQGTGR | 904 |
| GDDPRQGTVR | 905 |
| ATMPTQGTPR | 906 |
| GGDPGQGTVR | 907 |
| TGSPIQGTLR | 908 |
| AEGPNQGTLR | 909 |
| SDGPGQGTAR | 910 |
| QNGPDQGTNR | 911 |
| EMIPVQGTGR | 912 |
| VERPPQGTDR | 913 |
| GTSPGQGTTR | 914 |
| QTMPPQGTVR | 915 |
| ESYPTQGTAR | 916 |
| DAVPKQGTVR | 917 |
| AEMPEQGTRR | 918 |
| SKDPIQGTTR | 919 |
| TASPIQGTGR | 920 |
| AGTPEQGTLR | 921 |
| SHDPSQGTLR | 922 |
| QYLPTQGTDR | 923 |
| MLRPVQGTDR | 924 |
| QAGPTQGTYR | 925 |
| EHSPLQGTSR | 926 |
| SASPTQGTLR | 927 |
| DTKPSQGTGR | 928 |
| MVVPIQGTGR | 929 |
| GTVPPQGTSR | 930 |
| EGAPIQGTAR | 931 |
| STVPNQGTTR | 932 |
| EGNPSQGTYR | 933 |
| SEGPHQGTLR | 934 |
| LDRPNQGTER | 935 |
| SSIPVQGTVR | 936 |
| AEVPHQGTNR | 937 |
| AAAPGQGTTR | 938 |
| LANPVQGTAR | 939 |
| MPMPGQGTGR | 940 |
| MSYPHQGTER | 941 |
| EGSPVQGTSR | 942 |
| EALPRQGTDR | 943 |
| ESYPRQGTDR | 944 |
| NASPGQGTSR | 945 |
| ENSPSQGTFR | 946 |
| LVMRGDTHSS | 947 |
| TLLRGDHSLT | 948 |
| TSTRGDVENR | 949 |
| NVSRGDVTRN | 950 |
| KYERGDVIQL | 951 |
| LTVRGDQSFQ | 952 |
| SALRGDGPLP | 953 |
| NVIRGDNSTT | 954 |
| SSNRGDVLTS | 955 |
| MHNRGDNQYT | 956 |
| NTSRGDSSST | 957 |
| SNFRGDSSVT | 958 |
| ATNRGDGRNL | 959 |
| NHGRGDPATL | 960 |
| TRERGDGNQE | 961 |
| TSDRGDTKPL | 962 |
| LTERGDRDRA | 963 |
| ERSRGDSSTT | 964 |
| GYNRGDDPPS | 965 |
| QSTRGDVLTS | 966 |
| NTTRGDQNPI | 967 |
| TNGRGDLTGT | 968 |
| SNQRGDSTRL | 969 |
| YRARGDGAID | 970 |
| QTLRGDNTPT | 971 |
| ELGRGDQHAR | 972 |
| SSFRGDNSER | 973 |
| THVRGDIVHN | 974 |
| VWQRGDITMN | 975 |
| TANRGDNTVT | 976 |
| ASVRGDSAMT | 977 |
| ESLRGDISTT | 978 |
| TSSRGDSTSV | 979 |
| LPTRGDTATT | 980 |
| MRDRGDTALE | 981 |
| DKPRGDFGTS | 982 |
| SRLRGDELNS | 983 |
| TNLRGDGKHT | 984 |
| LQGRGDPQVA | 985 |
| SVPRGDSAGL | 986 |
| SELRGDYPVN | 987 |
| GGLRGDASNP | 988 |
| DLNRGDVQRP | 989 |
| EQQRGDKAIT | 990 |
| RTFRGDPNVQ | 991 |
| RATRGDSAET | 992 |
| SYYRGDPQST | 993 |
| RTVRGDVSNP | 994 |
| SNNRGDGSFT | 995 |
| TGGRGDAHEW | 996 |
| MQTRGDPKML | 997 |
| LGIRGDPHTT | 998 |
| QLGRGDTNER | 999 |
| AVIRGDNVML | 1000 |
| VDRRGDVSAE | 1001 |
| VTLRGDKNST | 1002 |
| SMLRGDTRIS | 1003 |
| WTHRGDPSER | 1004 |
| LAVRGDVSHG | 1005 |
| MWLRGDSTVS | 1006 |
| SVKRGDGEPF | 1007 |
| TGRRGDNLEL | 1008 |
| TYMRGDTNQQ | 1009 |
| SNVRGDTLTT | 1010 |
| TWTRGDDAKL | 1011 |
| MSIRGDSQAQ | 1012 |
| LFTRGDSMVT | 1013 |
| YKERGDPLAP | 1014 |
| TPVRGDVTPS | 1015 |
| EVVRGDPSNY | 1016 |
| DTKRGDVAPR | 1017 |
| ITYRGDNSTL | 1018 |
| LNGRGDNLYE | 1019 |
| CTERGDQVSN | 1020 |
| TMHRGDNNRV | 1021 |
| TRDRGDNLTE | 1022 |
| YVLRGDSSSH | 1023 |
| GPTRGDSVLT | 1024 |
| TWMRGDDTHS | 1025 |
| TGTRGDTDII | 1026 |
| TNARGDGFQG | 1027 |
| TTHRGDPLPA | 1028 |
| SLGRGDRSEG | 1029 |
| ELSRGDTVTV | 1030 |
| GTLRGDNSPL | 1031 |
| MALRGDGVSG | 1032 |
| NAYRGDKTQA | 1033 |
| GAARGDGAGA | 1034 |
| TSWRGDSRDL | 1035 |
| VTLRGDNSRE | 1036 |
| VTERGDDRAL | 1037 |
| TSTRGDTLMT | 1038 |
| TDARGDAGQA | 1039 |
| TRDRGDHAPT | 1040 |
| SGTRGDTVDA | 1041 |
| SGNRGDSAST | 1042 |
| SSMRGDDSHY | 1043 |
| EGARGDKQAT | 1044 |
| LSSRGDLQER | 1045 |
| QLERGDNSSS | 1046 |
| VVARGDVVAL | 1047 |
| RQTRGDTTSA | 1048 |
| TTSRGDTASG | 1049 |
| AQGRGDPPTI | 1050 |
| ETHRGDQHDP | 1051 |
| RTYRGDDSEI | 1052 |
| ESLRGDLRHS | 1053 |
| NKLRGDDMTN | 1054 |
| ESVRGDSMAH | 1055 |
| QDARGDMTRM | 1056 |
| QTVRGDIQVT | 1057 |
| TSRRGDMSKH | 1058 |
| TAARGDTEVR | 1059 |
| KSERGDLRNT | 1060 |
| THPRGDNHIL | 1061 |
| SGPRGDSNGV | 1062 |
| QMHRGDQGQV | 1063 |
| ERGRGDPATL | 1064 |
| DGVRGDDNKL | 1065 |
| QLERGDKITL | 1066 |
| DSYRGDRTNL | 1067 |
| HWMRGDDTET | 1068 |
| LPGRGDPSTY | 1069 |
| LAPRGDYTLT | 1070 |
| NQMRGDGTHP | 1071 |
| ATSRGDSLQM | 1072 |
| NRDRGDTTES | 1073 |
| IAVRGDQRLT | 1074 |

TABLE 9
Top Ranking n-mer inserts, P-moitfs, and/or RGD
Motifs Having CNS and Skeletal Muscle Specificity

| Motif Variant | SEQ ID NO: |
|---|---|
| SGDPSQGTYR | 1075 |
| SREPNQGTPR | 1076 |
| NVSPTQGTSR | 1077 |
| AAQPYQGTGR | 1078 |
| SRDPPQGTTR | 1079 |
| SSVPKQGTER | 1080 |
| QASPVQGTTR | 1081 |
| SERPEQGTQR | 1082 |
| MTVPNQGTNR | 1083 |
| SLNPQQGTTR | 1084 |
| AGTPSQGTLR | 1085 |
| MEPPHQGTGR | 1086 |
| TQVPTQGTVR | 1087 |
| MASPGQGTLR | 1088 |
| SSLPGQGTMR | 1089 |
| DAVPKQGTVR | 1090 |
| MVNPIQGTGR | 1091 |
| LPRPVQGTDR | 1092 |
| SESPYQGTLR | 1093 |
| ESRPNQGTDR | 1094 |
| SGTPIQGTLR | 1095 |
| TTSPTQGTSR | 1096 |
| MEGPSQGTMR | 1097 |
| NNTPSQGTSR | 1098 |
| AQEPWQGTGR | 1099 |
| QNMPLQGTGR | 1100 |
| AQSPPQGTQR | 1101 |
| NTNPDQGTMR | 1102 |
| ETNPRQGTDR | 1103 |
| EMGPRQGTDR | 1104 |
| DYSPGQGTVR | 1105 |
| MLTPHQGTPR | 1106 |
| AMNPVQGTPR | 1107 |
| SQMPNQGTAR | 1108 |
| VAHPSQGTER | 1109 |
| LANPVQGTAR | 1110 |
| AIDPKQGTFR | 1111 |
| EAYPRQGTDR | 1112 |
| SSSPDQGTTR | 1113 |
| EGVPIQGTHR | 1114 |
| TAIPSQGTSR | 1115 |
| NVNPNQGTDR | 1116 |
| GVTPAQGTAR | 1117 |
| TMSPPQGTGR | 1118 |
| GTVPSQGTSR | 1119 |
| SEMPSQGTSR | 1120 |
| TVTPVQGTSR | 1121 |
| GSTPSQGTMR | 1122 |
| TKEPGQGTAR | 1123 |
| AGTPVQGTSR | 1124 |
| SESPKQGTDR | 1125 |
| ADNPIQGTGR | 1126 |
| ERTPVQGTDR | 1127 |
| KHEPNQGTER | 1128 |
| TSTPTQGTPR | 1129 |
| LETPTQGTSR | 1130 |
| GATPNQGTAR | 1131 |
| FGSPAQGTGR | 1132 |
| ASNPMQGTTR | 1133 |
| SYSPLQGTTR | 1134 |
| SALPAQGTNR | 1135 |
| SQTPTQGTVR | 1136 |
| EGTPAQGTGR | 1137 |
| TDVPYQGTGR | 1138 |
| GHEPNQGTAR | 1139 |
| SSTPGQGTAR | 1140 |
| TGLPMQGTGR | 1141 |
| TQVPTQGTVR | 1142 |
| SDRPYQGTDR | 1143 |
| VSVPGQGTLR | 1144 |
| DSGPGQGTTR | 1145 |
| ATIPVQGTDR | 1146 |
| MTSPIQGTVR | 1147 |
| TRDPGQGTNR | 1148 |
| YPGPEQGTGR | 1149 |
| SNSPPQGTER | 1150 |
| GTSPIQGTLR | 1151 |
| MVSPTQGTSR | 1152 |
| MEGPHQGTGR | 1153 |
| IEGPTQGTSR | 1154 |
| SKEPVQGTSR | 1155 |
| TMGPNQGTTR | 1156 |
| QNYPTQGTTR | 1157 |
| SESPVQGTVR | 1158 |
| SYAPSQGTAR | 1159 |
| TSQPTQGTGR | 1160 |
| QIRPSQGTDR | 1161 |
| DGSPNQGTGR | 1162 |
| SGEPNQGTLR | 1163 |
| ASLPVQGTSR | 1164 |
| VVNPTQGTIR | 1165 |
| EDLPRQGTGR | 1166 |
| SFLPNQGTAR | 1167 |
| KGTPSQGTER | 1168 |
| SFTPVQGTSR | 1169 |
| GVLPQQGTPR | 1170 |
| NSPPPQGTNR | 1171 |
| AREPVQGTVR | 1172 |
| GTTPMQGTSR | 1173 |
| TLLRGDHSLT | 1174 |
| TSTRGDVENR | 1175 |
| NVSRGDVTRN | 1176 |
| KYERGDVIQL | 1177 |
| LTVRGDQSFQ | 1178 |
| SALRGDGPLP | 1179 |
| NVIRGDNSTT | 1180 |
| SSNRGDVLTS | 1181 |
| MHNRGDNQYT | 1182 |
| NTSRGDSSST | 1183 |
| SNFRGDSSVT | 1184 |
| ATNRGDGRNL | 1185 |
| NHGRGDPATL | 1186 |
| TRERGDGNQE | 1187 |
| TSDRGDTKPL | 1188 |
| LTERGDRDRA | 1189 |
| ERSRGDSSTT | 1190 |
| GYNRGDDPPS | 1191 |
| QSTRGDVLTS | 1192 |
| NTTRGDQNPI | 1193 |
| TNGRGDLTGT | 1194 |
| SNQRGDSTRL | 1195 |
| YRARGDGAID | 1196 |
| QTLRGDNTPT | 1197 |
| ELGRGDQHAR | 1198 |
| SSFRGDNSER | 1199 |
| THVRGDIVHN | 1200 |
| VWQRGDITMN | 1201 |
| TANRGDNTVT | 1202 |
| ASVRGDSAMT | 1203 |
| ESLRGDISTT | 1204 |
| TSSRGDSTSV | 1205 |
| LPTRGDTATT | 1206 |
| MRDRGDTALE | 1207 |
| DKPRGDFGTS | 1208 |
| SRLRGDELNS | 1209 |
| TNLRGDGKHT | 1210 |
| LQGRGDPQVA | 1211 |
| SVPRGDSAGL | 1212 |
| SELRGDYPVN | 1213 |
| GGLRGDASNP | 1214 |
| DLNRGDVQRP | 1215 |
| EQQRGDKAIT | 1216 |
| RTFRGDPNVQ | 1217 |
| RATRGDSAET | 1218 |
| SYYRGDPQST | 1219 |
| RTVRGDVSNP | 1220 |
| SNNRGDGSFT | 1221 |
| TGGRGDAHEW | 1222 |
| MQTRGDPKML | 1223 |
| LGIRGDPHTT | 1224 |
| QLGRGDTNER | 1225 |
| AVIRGDNVML | 1226 |
| VDRRGDVSAE | 1227 |
| VTLRGDKNST | 1228 |
| SMLRGDTRIS | 1229 |
| WTHRGDPSER | 1230 |
| LAVRGDVSHG | 1231 |
| MWLRGDSTVS | 1232 |
| SVKRGDGEPF | 1233 |
| TGRRGDNLEL | 1234 |
| TYMRGDTNQQ | 1235 |
| SNVRGDTLTT | 1236 |
| TWTRGDDAKL | 1237 |
| MSIRGDSQAQ | 1238 |
| LFTRGDSMVT | 1239 |
| YKERGDPLAP | 1240 |
| TPVRGDVTPS | 1241 |
| EVVRGDPSNY | 1242 |
| DTKRGDVAPR | 1243 |
| ITYRGDNSTL | 1244 |
| LNGRGDNLYE | 1245 |
| CTERGDQVSN | 1246 |
| TMHRGDNNRV | 1247 |
| TRDRGDNLTE | 1248 |
| YVLRGDSSSH | 1249 |
| GPTRGDSVLT | 1250 |
| TWMRGDDTHS | 1251 |
| TGTRGDTDII | 1252 |
| TNARGDGFQG | 1253 |
| TTHRGDPLPA | 1254 |
| SLGRGDRSEG | 1255 |
| ELSRGDTVTV | 1256 |
| GTLRGDNSPL | 1257 |
| MALRGDGVSG | 1258 |
| NAYRGDKTQA | 1259 |
| GAARGDGAGA | 1260 |
| TSWRGDSRDL | 1261 |
| VTLRGDNSRE | 1262 |
| VTERGDDRAL | 1263 |
| TSTRGDTLMT | 1264 |
| TDARGDAGQA | 1265 |
| TRDRGDHAPT | 1266 |
| SGTRGDTVDA | 1267 |
| SGNRGDSAST | 1268 |
| SSMRGDDSHY | 1269 |
| EGARGDKQAT | 1270 |
| LSSRGDLQER | 1271 |
| QLERGDNSSS | 1272 |
| VVARGDVVAL | 1273 |
| RQTRGDTTSA | 1274 |
| TTSRGDTASG | 1275 |
| AQGRGDPPTI | 1276 |
| ETHRGDQHDP | 1277 |
| RTYRGDDSEI | 1278 |
| ESLRGDLRHS | 1279 |
| NKLRGDDMTN | 1280 |
| ESVRGDSMAH | 1281 |
| QDARGDMTRM | 1282 |
| QTVRGDIQVT | 1283 |
| TSRRGDMSKH | 1284 |
| TAARGDTEVR | 1285 |
| KSERGDLRNT | 1286 |
| THPRGDNHIL | 1287 |
| SGPRGDSNGV | 1288 |
| QMHRGDQGQV | 1289 |
| ERGRGDPATL | 1290 |
| DGVRGDDNKL | 1291 |
| QLERGDKITL | 1292 |
| DSYRGDRTNL | 1293 |
| HWMRGDDTET | 1294 |
| LPGRGDPSTY | 1295 |
| LAPRGDYTLT | 1296 |
| NOMRGDGTHP | 1297 |
| ATSRGDSLQM | 1298 |
| NRDRGDTTES | 1299 |
| IAVRGDQRLT | 1300 |

TABLE 10
Top Ranking n-mer inserts and/or P-Motifs
having CNS and Cardiac Muscle Specificity

| Variant | SEQ ID NO: |
|---|---|
| EGAPSQGTYR | 1301 |
| TASPSQGTTR | 1302 |
| GTEPKQGTLR | 1303 |
| NAGPSQGTSR | 1304 |
| MATPTQGTSR | 1305 |
| NGTPEQGTTR | 1306 |
| GTVPYQGTGR | 1307 |
| GGNPVQGTAR | 1308 |
| NSGPGQGTMR | 1309 |
| AHAPLOGTAR | 1310 |
| GVLPGQGTGR | 1311 |
| MMHPVQGTER | 1312 |
| MNGPQQGTLR | 1313 |
| TMLPVQGTGR | 1314 |
| LEHPTQGTGR | 1315 |
| TYNPTQGTVR | 1316 |
| GSLPSQGTIR | 1317 |
| EATPSQGTMR | 1318 |
| CANPVQGTNR | 1319 |
| SSGPNQGTVR | 1320 |
| GQKPDQGTVR | 1321 |
| MQVPTQGTSR | 1322 |
| GSLPIQGTSR | 1323 |
| WLGPGQGTER | 1324 |
| EQNPKQGTER | 1325 |
| DGSPVQGTGR | 1326 |
| SMHPTQGTAR | 1327 |
| SGQPWQGTDR | 1328 |
| EPGPPQGTNR | 1329 |
| SMDPAQGTQR | 1330 |
| GTNPGQGTIR | 1331 |
| TNVPSQGTMR | 1332 |
| IEKPSQGTER | 1333 |
| YEGPSQGTGR | 1334 |
| TPYPNQGTER | 1335 |
| TREPFQGTGR | 1336 |
| GTVPTQGTGR | 1337 |
| GSDPSQGTMR | 1338 |
| SFQPPQGTNR | 1339 |
| YATPSQGTVR | 1340 |
| GTGPHQGTLR | 1341 |
| ATQPDQGTGR | 1342 |
| NGFPIQGTER | 1343 |
| LGSPSQGTTR | 1344 |
| TEMPVQGTVR | 1345 |
| SNSPPQGTER | 1346 |
| GTMPQQGTGR | 1347 |
| MEHPTQGTGR | 1348 |
| MSGPSQGTNR | 1349 |
| SMLPHQGTSR | 1350 |
| VRDPNQGTSR | 1351 |
| LQAPSQGTAR | 1352 |
| GMEPPQGTVR | 1353 |
| VTTPLQGTDR | 1354 |
| MAAPVQGTPR | 1355 |
| STEPDQGTKR | 1356 |
| VGTPEQGTAR | 1357 |
| AGSPTQGTLR | 1358 |
| GNTPSQGTVR | 1359 |
| GGAPVQGTSR | 1360 |
| QGLPTQGTPR | 1361 |
| TTSPSQGTAR | 1362 |
| NHTPAQGTQR | 1363 |
| YTSPVQGTVR | 1364 |
| SGEPVQGTVR | 1365 |
| EGNPAQGTVR | 1366 |
| SSEPNQGTPR | 1367 |
| GAIPNQGTTR | 1368 |
| MAHPVQGTER | 1369 |
| VLHPVQGTDR | 1370 |
| AQDPSQGTSR | 1371 |
| LVDPIQGTIR | 1372 |
| ARDPMQGTGR | 1373 |
| SVTPVQGTLR | 1374 |
| AVTPAQGTLR | 1375 |
| MANPSQGTVR | 1376 |
| GSIPSQGTSR | 1377 |
| MGVPEQGTTR | 1378 |
| EGSPYQGTDR | 1379 |
| MGYPMQGTGR | 1380 |
| SWTPNQGTNR | 1381 |
| GNGPSQGTTR | 1382 |
| SEVPIQGTVR | 1383 |
| GQLPSQGTGR | 1384 |
| GHNPDQGTVR | 1385 |
| ETGPPQGTMR | 1386 |
| SALPDQGTAR | 1387 |
| MSSPPQGTAR | 1388 |
| SISPTQGTGR | 1389 |
| VSAPSQGTQR | 1390 |
| QMMPSQGTVR | 1391 |
| LASPPQGTSR | 1392 |
| SSDPKQGTPR | 1393 |
| ESEPRQGTTR | 1394 |
| NAGPDQGTVR | 1395 |
| MASPIQGTTR | 1396 |
| GPLPVQGTMR | 1397 |
| NSLPKQGTDR | 1398 |
| GSMPAQGTNR | 1399 |
| SAGPLQGTAR | 1400 |
| SGPPEQGTNR | 1401 |
| GTSPIQGTLR | 1402 |
| AMQPVQGTAR | 1403 |
| YTSPIQGTNR | 1404 |
| ANSPVQGTVR | 1405 |
| SPVPKQGTER | 1406 |
| AESPVQGTGR | 1407 |
| SMHPTQGTAR | 1408 |
| MSGPEQGTLR | 1409 |
| AQAPEQGTIR | 1410 |
| RLQPVQGTDR | 1411 |
| TSVPSQGTER | 1412 |
| AAVPVQGTPR | 1413 |
| GMAPGQGTAR | 1414 |
| GMMPAQGTNR | 1415 |
| SEHPSQGTMR | 1416 |
| SYAPSQGTAR | 1417 |
| SWSPIQGTSR | 1418 |
| SNTPDQGTSR | 1419 |
| GQQPAQGTQR | 1420 |
| NTIPGQGTSR | 1421 |
| SDRPSQGTDR | 1422 |
| SSAPIQGTTR | 1423 |
| RVEPSQGTER | 1424 |
| QHTPIQGTDR | 1425 |
| GTTPMQGTSR | 1426 |
| LEGPVQGTTR | 1427 |
| IGEPHQGTMR | 1428 |
| AGFPVQGTDR | 1429 |
| YSSPVQGTER | 1430 |
| MMTPGQGTPR | 1431 |
| SESPFQGTVR | 1432 |
| TVTPMQGTLR | 1433 |
| TEGPLQGTHR | 1434 |
| LRSPVQGTDR | 1435 |
| SVLPQQGTTR | 1436 |
| EEMPNQGTRR | 1437 |
| SRMPDQGTSR | 1438 |
| SISPLQGTTR | 1439 |
| GVHPDQGTGR | 1440 |
| GMMPVQGTGR | 1441 |
| MASPVQGTSR | 1442 |
| SPMPSQGTSR | 1443 |
| SAAPIQGTNR | 1444 |
| CDGPVQGTNR | 1445 |
| QHQPYQGTER | 1446 |
| YSYPTQGTTR | 1447 |
| IVGPSQGTAR | 1448 |
| TDKPVQGTDR | 1449 |
| GADPRQGTIR | 1450 |
| NTSPSQGTVR | 1451 |
| AGTPAQGTTR | 1452 |
| LRSPPQGTDR | 1453 |
| SDRPPQGTFR | 1454 |
| DAAPVQGTLR | 1455 |
| MGTPVQGTER | 1456 |
| NSCPGQGTCR | 1457 |
| VTSPAQGTNR | 1458 |
| SEQPSQGTQR | 1459 |
| SQAPPQGTLR | 1460 |
| ATTPGQGTGR | 1461 |
| LSGPGQGTYR | 1462 |
| LTVPEQGTVR | 1463 |
| EGKPEQGTYR | 1464 |
| SQNPNQGTDR | 1465 |
| SMIPGQGTVR | 1466 |
| ANAPNQGTMR | 1467 |
| QEGPLQGTQR | 1468 |
| MEPPLQGTTR | 1469 |
| ERAPYQGTDR | 1470 |
| LEGPTQGTAR | 1471 |
| LRQPDQGTTR | 1472 |
| DRMPGQGTSR | 1473 |
| EGGPVQGTQR | 1474 |
| EGLPIQGTTR | 1475 |
| SSTPVQGTVR | 1476 |
| VVGPTQGTER | 1477 |
| SVVPVQGTQR | 1478 |
| SLGPPQGTLR | 1479 |
| SFTPVQGTSR | 1480 |
| DGRPYQGTTR | 1481 |
| ASVPVQGTGR | 1482 |
| ATAPVQGTNR | 1483 |
| SAAPYQGTSR | 1484 |
| AGLPIQGTTR | 1485 |
| SKVPAQGTER | 1486 |
| ASAPMQGTMR | 1487 |
| SAYPTQGTMR | 1488 |
| VTGPDQGTGR | 1489 |
| MTQPGQGTIR | 1490 |
| ALGPSQGTSR | 1491 |
| GVIPVQGTSR | 1492 |
| CEVPSQGTAR | 1493 |
| SNAPAQGTVR | 1494 |
| SAQPNQGTPR | 1495 |
| ETGPAQGTAR | 1496 |
| GVSPAQGTVR | 1497 |

TABLE 11
Top Ranking n-mer inserts and/or P-Motifs
having Cardiac Muscle and CNS Specificity

| Variant | SEQ ID NO: |
|---|---|
| EGAPSQGTYR | 1498 |
| EATPSQGTMR | 1499 |
| GTEPKQGTLR | 1500 |
| MEHPTQGTGR | 1501 |
| SEMPSQGTSR | 1502 |
| GVLPGQGTGR | 1503 |
| GPLPVQGTMR | 1504 |
| SALPDQGTAR | 1505 |
| MATPTQGTSR | 1506 |
| NGTPEQGTTR | 1507 |
| GTVPYQGTGR | 1508 |
| GGNPVQGTAR | 1509 |
| FEAPSQGTGR | 1510 |
| AHAPLOGTAR | 1511 |
| MNGPQQGTLR | 1512 |
| MQGPTQGTDR | 1513 |
| TASPSQGTTR | 1514 |
| SESPSQGTSR | 1515 |
| MMHPVQGTER | 1516 |
| ETGPPQGTMR | 1517 |
| NHTPAQGTQR | 1518 |
| TNVPSQGTMR | 1519 |
| LEHPTQGTGR | 1520 |
| SSGPNQGTVR | 1521 |
| GQKPDQGTVR | 1522 |
| TMLPVQGTGR | 1523 |
| CANPVQGTNR | 1524 |
| GSDPSQGTMR | 1525 |
| DGSPVQGTGR | 1526 |
| TYNPTQGTVR | 1527 |
| WLGPGQGTER | 1528 |
| TPYPNQGTER | 1529 |
| SMHPTQGTAR | 1530 |
| STQPTQGTDR | 1531 |
| NRQPDQGTAR | 1532 |
| SESPVQGTVR | 1533 |
| FEVPQQGTLR | 1534 |
| IETPAQGTGR | 1535 |
| ISDPNQGTAR | 1536 |
| EFGPTQGTLR | 1537 |
| LDHPTQGTIR | 1538 |
| TDAPTQGTMR | 1539 |
| CEGPKQGTDR | 1540 |
| LGSPSQGTTR | 1541 |
| ATQPDQGTGR | 1542 |
| YATPSQGTVR | 1543 |
| MSGPSQGTNR | 1544 |
| GTMPQQGTGR | 1545 |
| MTSPDQGTMR | 1546 |
| AGSPTQGTLR | 1547 |
| ASDPKQGTYR | 1548 |
| GNTPSQGTVR | 1549 |
| GMEPPQGTVR | 1550 |
| GSPPEQGTGR | 1551 |
| LQAPSQGTAR | 1552 |
| LNGPVQGTTR | 1553 |
| YCTPQQGTTR | 1554 |
| HTDPTQGTGR | 1555 |
| SSYPAQGTAR | 1556 |
| SNSPPQGTER | 1557 |
| TEMPVQGTVR | 1558 |
| ARDPMQGTGR | 1559 |
| GGAPVQGTSR | 1560 |
| TTSPSQGTAR | 1561 |
| YTSPVQGTVR | 1562 |
| STEPDQGTKR | 1563 |
| EGNPAQGTVR | 1564 |
| MGVPEQGTTR | 1565 |
| EGSPYQGTDR | 1566 |
| LESPSQGTGR | 1567 |
| GQLPSQGTGR | 1568 |
| GHNPDQGTVR | 1569 |
| MAAPVQGTPR | 1570 |
| AVIPTQGTSR | 1571 |
| VTTPLQGTDR | 1572 |
| THLPGQGTGR | 1573 |
| QMMPSQGTVR | 1574 |
| TAWPTQGTTR | 1575 |
| ESEPRQGTTR | 1576 |
| NAGPDQGTVR | 1577 |
| TSYPVQGTLR | 1578 |
| MASPIQGTTR | 1579 |
| TNSPGQGTVR | 1580 |
| SGEPVQGTVR | 1581 |
| NSLPKQGTDR | 1582 |
| MANPSQGTVR | 1583 |
| AQAPLOGTPR | 1584 |
| GSMPAQGTNR | 1585 |
| SAGPLOGTAR | 1586 |
| SESPSQGTHR | 1587 |
| QGLPTQGTPR | 1588 |
| YTSPIQGTNR | 1589 |
| LVDPIQGTIR | 1590 |
| MGYPMQGTGR | 1591 |
| SPVPKQGTER | 1592 |
| SMHPTQGTAR | 1593 |
| DSKPPQGTSR | 1594 |
| TQMPDQGTHR | 1595 |
| AAVPVQGTPR | 1596 |
| GMMPAQGTNR | 1597 |
| SWSPIQGTSR | 1598 |
| INSPIQGTAR | 1599 |
| CSVPNQGTGR | 1600 |
| SATPTQGTFR | 1601 |
| SWTPNQGTNR | 1602 |
| SISPTQGTGR | 1603 |
| SSEPNQGTPR | 1604 |
| YSSPVQGTER | 1605 |
| LHTPSQGTPR | 1606 |
| SESPFQGTVR | 1607 |
| TDGPGQGTAR | 1608 |
| GAIPNQGTTR | 1609 |
| GNGPSQGTTR | 1610 |
| EEMPNQGTRR | 1611 |
| SRMPDQGTSR | 1612 |
| DSKPGQGTMR | 1613 |
| SISPLQGTTR | 1614 |
| SPMPSQGTSR | 1615 |
| NTSPSQGTVR | 1616 |
| SDRPPQGTFR | 1617 |
| AATPTQGTTR | 1618 |
| DAAPVQGTLR | 1619 |
| NSGPGQGTMR | 1620 |
| SPMPSQGTSR | 1621 |
| TSSPTQGTMR | 1622 |
| IKSPDQGTGR | 1623 |
| KSEPVQGTTR | 1624 |
| QYSPQQGTGR | 1625 |
| SQAPPQGTLR | 1626 |
| AGVPIQGTER | 1627 |
| GTSPIQGTLR | 1628 |
| GGTPAQGTQR | 1629 |
| MLMPSQGTDR | 1630 |
| VSAPSQGTQR | 1631 |
| LRTPVQGTDR | 1632 |
| RVEPSQGTER | 1633 |
| TSLPQQGTSR | 1634 |
| QEGPLQGTQR | 1635 |
| DAGPNQGTAR | 1636 |
| STNPTQGTVR | 1637 |
| MEPPLQGTTR | 1638 |
| NSVPGQGTLR | 1639 |
| GMAPGQGTAR | 1640 |
| LRQPDQGTTR | 1641 |
| TANPNQGTYR | 1642 |
| MAMPAQGTLR | 1643 |
| SNLPGQGTLR | 1644 |
| EGVPRQGTDR | 1645 |
| QVSPTQGTSR | 1646 |
| NAGPSQGTSR | 1647 |
| GTTPMQGTSR | 1648 |
| SAAPYQGTSR | 1649 |
| TVTPMQGTLR | 1650 |
| SEAPTQGTGR | 1651 |
| MMTPGQGTPR | 1652 |
| SVLPQQGTTR | 1653 |
| SGEPPQGTNR | 1654 |
| ALGPSQGTSR | 1655 |
| DGTPYQGTSR | 1656 |
| TEVPKQGTPR | 1657 |
| LPTPSQGTSR | 1658 |
| SVTPVQGTLR | 1659 |
| MYKPIQGTER | 1660 |
| MGTPVQGTER | 1661 |
| SDGPGQGTGR | 1662 |
| LQYPEQGTER | 1663 |
| AMQPVQGTAR | 1664 |
| MMNPGQGTLR | 1665 |
| SHLPNQGTVR | 1666 |
| ANSPVQGTVR | 1667 |
| GSAPDQGTLR | 1668 |
| VENPTQGTYR | 1669 |
| LGQPPQGTSR | 1670 |
| WAGPSQGTLR | 1671 |
| ANNPSQGTFR | 1672 |
| NQIPLQGTLR | 1673 |
| SNSPVQGTMR | 1674 |
| EVGPTQGTTR | 1675 |
| TVKPTQGTER | 1676 |
| MASPVQGTSR | 1677 |
| SWGPGQGTIR | 1678 |
| AETPNQGTFR | 1679 |
| GVHPDQGTGR | 1680 |
| GMMPVQGTGR | 1681 |
| AAVPLQGTTR | 1682 |
| SEVPIQGTVR | 1683 |
| MTLPGQGTPR | 1684 |
| SDRPDQGTAR | 1685 |
| MQVPTQGTSR | 1686 |
| MNGPLQGTSR | 1687 |
| NDKPVQGTAR | 1688 |
| LSNPVQGTGR | 1689 |
| SLTPVQGTQR | 1690 |
| AVTPVQGTSR | 1691 |
| AGFPVQGTDR | 1692 |
| AGTPAQGTTR | 1693 |
| RDSPGQGTER | 1694 |
| LDSPYQGTGR | 1695 |
| GSLPIQGTSR | 1696 |
| SGQPWQGTDR | 1697 |
| GQVPTQGTNR | 1698 |

[0509] Various modifications and variations of the described methods, pharmaceutical compositions, and kits of the invention will be apparent to those skilled in the art without departing from the scope and spirit of the invention. Although the invention has been described in connection with specific embodiments, it will be understood that it is capable of further modifications and that the invention as claimed should not be unduly limited to such specific embodiments. Indeed, various modifications of the described modes for carrying out the invention that are obvious to those skilled in the art are intended to be within the scope of the invention. This application is intended to cover any variations, uses, or adaptations of the invention following, in general, the principles of the invention and including such departures from the present disclosure come within known customary practice within the art to which the invention pertains and may be applied to the essential features herein before set forth.

What is claimed is:

1. A composition comprising:
a targeting moiety effective to target a muscle cell or both a muscle cell and a central nervous system (CNS) cell, wherein the targeting moiety comprises one or more n-mer inserts each comprising:
one or more P-motifs, wherein at least one P-motif comprises or consists of the amino acid sequence XₘPX₁QGTX₂RXₙ (SEQ ID NO: 1699), wherein X₁, X₂, Xₘ, and Xₙ are each independently selected from any amino acid, wherein m is 0, 1, 2, or 3, and wherein n is 0, 1, 2, 3, 4, 5, 6, or 7; or
one or more RGD motifs, wherein at least one of the RGD motifs comprises or consists of XₘRGDXₙ, wherein m is 0-4 amino acids, wherein n is 0-15 amino acids, and wherein Xₘ, and Xₙ are each independently selected from any amino acid; or
both, and
optionally a cargo, wherein the cargo is coupled to or is otherwise associated with the targeting moiety.

2. The composition of claim 1, wherein the one or more of the one or more P-motifs and one or more of the RGD motifs are each independently selected from any one set forth in one or more of SEQ ID NOs: 4-1698 (Tables 4-11).

3. The composition of any one of the preceding claims, wherein the one or more RGD motifs and/or the one or more P motifs are selected from any one or more set forth in:
a. SEQ ID NOs: 4-250 (Table 4);
b. SEQ ID NOs: 497-647 (Table 6);
c. SEQ ID NOs: 799-1074 (Table 8);
d. SEQ ID NOs: 1301-1497 (Table 10); or
e. any combination thereof.

4. The composition of any one of the preceding claims, wherein the one or more RGD motifs and/or the one or more P motifs are selected from any one or more set forth in:
a. SEQ ID NOs: 251-496 (Table 5);
b. SEQ ID NOs: 648-798 (Table 7);
c. SEQ ID NOs: 1498-1698 (Table 9);
d. SEQ ID NOs: 1075-1300 (Table 11); or
e. any combination thereof.

5. The composition of any one of the preceding claims, wherein the one or more RGD motifs and/or the one or more P motifs are selected from any one or more set forth in:
a. SEQ ID NOs: 4-250 (Table 4) and/or SEQ ID NOs: 251-496 (Table 5);
b. SEQ ID NOs: 497-647 (Table 6) and/or SEQ ID NOs: 648-798 (Table 7);
c. SEQ ID NOs: 799-1074 (Table 8) and/or SEQ ID NOs: 1498-1698 (Table 9); or
d. SEQ ID NOs: 1301-1497 (Table 10) and/or SEQ ID NOs: 1075-1300 (Table 11).

6. The composition of any one of the preceding claims, wherein the targeting moiety is effective target
a. a skeletal muscle cell;
b. a cardiac muscle cell;
c. a skeletal muscle cell and a CNS cell; or
d. a cardiac muscle cell and a CNS cell.

7. The composition of any one of the preceding claims, wherein the one or more n-mer inserts are each 3-25 or 3-15 amino acids in length.

8. The composition of any one of the preceding claims, wherein
a. X₁ is S, T, or A,
b. X₂ is L, V, F, or I, or
c. both.

9. The composition of any one of the preceding claims, wherein the one or more RGD motifs and/or one or more P-motifs is/are immediately preceded by AQ or DG in the targeting moiety.

10. The composition of any one of the preceding claims, wherein the targeting moiety comprises a polypeptide, a polynucleotide, a lipid, a polymer, a sugar, or a combination thereof.

11. The composition of any one of the preceding claims, wherein the targeting moiety comprises a viral protein.

12. The composition of claim 11, wherein the viral protein is a capsid protein.

13. The composition of any one of claims 11-12, wherein one or more of the n-mer inserts are incorporated into the viral protein such that at least one of the one or more RGD motifs, at least one of the one or more P motifs, or both is/are located between two amino acids of the viral protein such that at least one of the one or more RGD motifs and/or one or more P-motifs is external to a viral capsid.

14. The composition of any one of claims 11-13, wherein the viral protein is an adeno associated virus (AAV) protein.

15. The composition of claim 14, wherein the AAV protein is an AAV capsid protein.

16. The composition of any one of claims 14-15, wherein one or more of the one or more n-mer inserts are incorporated into the AAV protein such that at least one or more of the one more RGD motifs and/or at least one or more of the one or more P motifs are each inserted between any two contiguous amino acids independently selected from amino acids 262-269, 327-332, 382-386, 452-460, 488-505, 527-539, 545-558, 581-593, 598-599, 704-714, or any combination thereof in an AAV9 capsid polypeptide or in an analogous position in an AAV1, AAV2, AAV3, AAV4, AAV5, AAV6, AAV7, AAV8, AAV rh.74, AAV rh.10 capsid polypeptide.

17. The composition of any one of claims 14-16, wherein at least one of the one or more n-mer inserts is incorporated into the AAV protein such that at least one of the one more RGD motifs and/or at least one of the one or more P motifs is inserted between amino acids 588 and 589 in an AAV9 capsid polypeptide or in an analogous position in an AAV1, AAV2, AAV3, AAV4, AAV5, AAV6, AAV7, AAV8, AAV rh.74, AAV rh.10 capsid polypeptide.

18. The composition of any one of claims 14-17, wherein the AAV capsid protein is an engineered AAV capsid protein having reduced or eliminated uptake in a non-CNS and/or non-muscle cell as compared to a corresponding wild-type AAV capsid polypeptide.

19. The composition of claim 18, wherein the non-CNS and/or non-muscle cell is a liver cell.

20. The composition of any one of claims 18-19, wherein the wild-type capsid polypeptide is an AAV1, AAV2, AAV3, AAV4, AAV5, AAV6, AAV7, AAV8, AAV9, AAV rh.74, or AAV rh.10 capsid polypeptide.

21. The composition of any one of claims 18-20, wherein the engineered AAV capsid protein comprises one or more mutations that result in reduced or eliminated uptake in a non-CNS and/or non-muscle cell.

22. The composition of claim 21, wherein the one or more mutations are
a. in position 267,
b. in position 269,
c. in position 504,
d. in position 505,
e. in position 590,
f. or any combination thereof
in the AAV9 capsid protein (SEQ ID NO: 1) or in one or more positions corresponding thereto in a non-AAV9 capsid polypeptide.

23. The composition of claim 22, wherein the non-AAV9 capsid protein is an AAV1, AAV2, AAV3, AAV4, AAV5, AAV6, AAV7, AAV8, AAV rh.74, or AAV rh.10 capsid polypeptide.

24. The composition of any one of claims 22-23, wherein the mutation in position 267 in the AAV9 capsid protein (SEQ ID NO: 1) or position corresponding thereto in a non-AAV9 capsid polypeptide is a G or X mutation to A, wherein X is any amino acid.

25. The composition of any one of claims 22-24, wherein the mutation in position 269 in the AAV9 capsid protein (SEQ ID NO: 1) or position corresponding thereto in a non-AAV9 capsid polypeptide is an S or X to T mutation, wherein X is any amino acid.

26. The composition of any one of claims 22-25, wherein the mutation in position 504 in the AAV9 capsid protein (SEQ ID NO: 1) or position corresponding thereto in a non-AAV9 capsid polypeptide is a G or X to A mutation, wherein X is any amino acid.

27. The composition of any one of claims 22-26, wherein the mutation in position 505 in the AAV9 capsid protein (SEQ ID NO: 1) or position corresponding thereto in a non-AAV9 capsid polypeptide is a P or X to A mutation, wherein X is any amino acid.

28. The composition of any one of claims 22-27, wherein the mutation in position 590 in the AAV9 capsid protein (SEQ ID NO: 1) or position corresponding thereto in a non-AAV9 capsid polypeptide is a Q or X to A mutation, wherein X is any amino acid.

29. The composition of any one of claims 21-23, wherein the engineered AAV capsid protein is an engineered AAV9 capsid polypeptide comprising a mutation at position 267, position 269 or both of a wild-type AAV9 capsid protein (SEQ ID NO: 1), wherein the mutation at position 267 is a G to A mutation and wherein the mutation at position 269 is an S to T mutation.

30. The composition of any one of claims 21-23, wherein the engineered AAV capsid protein is an engineered AAV9 capsid polypeptide comprising a mutation at position 590 of a wild-type AAV9 capsid protein (SEQ ID NO: 1), wherein the mutation at position 509 is a Q to A mutation.

31. The composition of any one of claims 21-23, wherein the engineered AAV capsid protein is an engineered AAV9 capsid polypeptide comprising a mutation at position 504, position 505, or both of a wild-type AAV9 capsid protein (SEQ ID NO: 1), wherein the mutation at position 504 is a G to A mutation and wherein the mutation at position 505 is a P to A mutation.

32. The composition of any one of claims 1-31, wherein the composition is an engineered viral particle.

33. The composition of claim 32, wherein the engineered viral particle is an engineered AAV viral particle.

34. The composition of claim 33, wherein the AAV viral particle is an engineered AAV1, AAV2, AAV3, AAV4, AAV5, AAV6, AAV7, AAV8, AAV9, AAV rh.74, or AAV rh.10 viral particle.

35. The composition of any of claims 1-34, wherein the optional cargo is capable of treating or preventing a CNS, a muscle disease or disorder, or both.

36. The composition of any one of claims 1-35, wherein the muscle disease and/or CNS disease or disorder is an auto immune disease; a cancer; a muscular dystrophy; a neuro-muscular disease; a sugar or glycogen storage disease; an expanded repeat disease; a dominant negative disease; a cardiomyopathy; a viral disease; a progeroid disease; or any combination thereof.

37. The composition of any one of claims 1-36, wherein the optional cargo is a morpholino, a peptide-linked morpholino, an antisense oligonucleotide, a PMO, a therapeutic transgene, a polynucleotide encoding a therapeutic polypeptide or peptide, a PPMO, one or more peptides, one or more polynucleotides encoding a CRISPR-Cas protein, a guide RNA, or both, a ribonucleoprotein, wherein the ribonucleoprotein comprises a CRISPR-Cas system molecule, a therapeutic transgene RNA, or other gene modifying or therapeutic RNA and/or protein, or any combination thereof.

38. The composition of any one of claims 1-37, wherein the optional cargo is capable of inducing exon skipping in a gene, optionally a dystrophin gene.

39. The composition of any one of claims 1-38, wherein the cargo is a mini- or micro-dystrophin gene.

40. The composition of claim 39, wherein the mini- or micro-dystrophin gene comprises spectrin-like repeats 1, 2, 3, and 24, and optionally an nNOS domain.

41. The composition of any one of claims 35-40, wherein the expanded repeat disease is Huntington's disease, a Myotonic Dystrophy, or Facioscapulohumeral muscular dystrophy (FSHD).

42. The composition of any one of claims 35-41, wherein the muscular dystrophy is Duchene muscular dystrophy, Becker Muscular dystrophy, a Limb-Girdle muscular dystrophy, an Emery-Dreifuss muscular dystrophy, a myotonic dystrophy, or FSHD.

43. The composition of claim 42, wherein the myotonic dystrophy is Type 1 or Type 2.

44. The composition of any one of claims 36-43, wherein the cardiomyopathy is dilated cardiomyopathy, hypertrophic cardiomyopathy, DMD-associated cardiomyopathy, or Dannon disease.

45. The composition of any one of claims 36-44, wherein the sugar or glycogen storage disease is a MPS type III disease or Pompe disease.

46. The composition of claim 45, wherein the MPS type III disease, is MPS Type IIIA, IIIB, IIIC, or HID.

47. The composition of any one of claims 36-46, wherein the neuro-muscular disease is Charcot-Marie-Tooth disease or Friedreich's Ataxia.

48. A vector system comprising:
a vector comprising:
one or more polynucleotides, wherein at least one of the one or more polynucleotides encodes all or part of a targeting moiety effective to target a muscle cell or both a muscle cell and a central nervous system (CNS) cell, wherein the targeting moiety comprises one or more n-mer inserts comprising:
one or more P-motifs, wherein at least one P-motif comprises or consists of the amino acid sequence XₘPX₁QGTX₂RXₙ (SEQ ID NO: 1699), wherein X₁, X₂, Xₘ, and Xₙ are each independently selected from any amino acid, wherein m is 0, 1, 2, or 3, and wherein n is 0, 1, 2, 3, 4, 5, 6, or 7; or
one or more RGD motifs, wherein at least one of the RGD motifs comprises or consists of XₘRGDXₙ, wherein m is 0-4 amino acids, wherein n is 0-15 amino acids, and wherein Xₘ, and Xₙ are each independently selected from any amino acid; or
both,
wherein at least one of the one or more polynucleotides encodes the at least one RGD motif, at least one P-motif, or both; and
optionally, a regulatory element operatively coupled to one or more of the one or more polynucleotides.

49. The vector system of claim 48, wherein the one or more of the one or more P-motifs and one or more of the RGD motifs are each independently selected from any one set forth in any one or more of SEQ ID NOs: 4-1698 (Tables 4-11).

50. The vector system of any one of the preceding claims, wherein the one or more RGD motifs and/or the one or more P motifs are selected from any one or more set forth in:
a. SEQ ID NOs: 4-250 (Table 4);
b. SEQ ID NOs: 497-647 (Table 6);
c. SEQ ID NOs: 799-1074 (Table 8);
d. SEQ ID NOs: 1301-1497 (Table 10); or
e. any combination thereof.

51. The vector system of any one of the preceding claims, wherein the one or more RGD motifs and/or the one or more P motifs are selected from any one or more set forth in:
a. SEQ ID NOs: 251-496 (Table 5);
b. SEQ ID NOs: 648-798 (Table 7);
c. SEQ ID NOs: 1498-1698 (Table 9);
d. SEQ ID NOs: 1075-1300 (Table 11); or
e. any combination thereof.

52. The vector system of any one of the preceding claims, wherein the one or more RGD motifs and/or the one or more P motifs are selected from any one or more set forth in:
a. SEQ ID NOs: 4-250 (Table 4) and/or SEQ ID NOs: 251-496 (Table 5);
b. SEQ ID NOs: 497-647 (Table 6) and/or SEQ ID NOs: 648-798 (Table 7);
c. SEQ ID NOs: 799-1074 (Table 8) and/or SEQ ID NOs: 1498-1698 (Table 9); or
d. SEQ ID NOs: 1301-1497 (Table 10) and/or SEQ ID NOs: 1075-1300 (Table 11).

53. The vector system of any one of the preceding claims, wherein the targeting moiety is effective target
a. a skeletal muscle cell;
b. a cardiac muscle cell;
c. a skeletal muscle cell and a CNS cell; or
d. a cardiac muscle cell and a CNS cell.

54. The vector system of any one of the preceding claims, wherein the one or more n-mer inserts are each 3-25 or 3-15 amino acids in length.

55. The vector system of any one of the preceding claims, wherein
a. X₁ is S, T, or A,
b. X₂ is L, V, F, or I, or
c. both.

56. The vector system of any one of the preceding claims, wherein the n-mer insert is immediately preceded by AQ or DG in the targeting moiety.

57. The vector system of any one of claims 48-56, further comprising a cargo.

58. The vector system of claim 57, wherein the cargo is a cargo polynucleotide and is optionally operatively coupled to one or more of the one or more polynucleotides encoding all or part of the targeting moiety.

59. The vector system of any one of claims 48-58, wherein the vector system is capable of producing virus particles, virus particles that contain the cargo, or both.

60. The vector system of any one of claims 48-59, wherein the vector system is capable of producing a polypeptide comprising one or more of the targeting moieties.

61. The vector system of claim 60, wherein the polypeptide is a viral polypeptide.

62. The vector system of claim 61, wherein the viral polypeptide is a capsid polypeptide.

63. The vector system of claim 62, wherein the capsid polypeptide is an adeno associated virus (AAV) capsid polypeptide.

64. The vector system of any one of claims 61-63, wherein the virus particles are AAV virus particles.

65. The vector system of any one of claims 51-52, wherein the AAV virus particles or AAV capsid polypeptide are engineered AAV1, AAV2, AAV3, AAV4, AAV5, AAV6, AAV7, AAV8, AAV9, AAV rh.74, or AAV rh.10 viral particles or polypeptides.

66. The vector system of any one of claims 61-63, wherein one or more of the one or more n-mer inserts are incorporated in the targeting moiety such that at least one of the one or more RGD motifs, at least one of the one or more P motifs, or both is/are located between two amino acids of the viral protein such that at least one of the one or more RGD motifs and/or at least one or more P-motifs is external to a viral capsid of the virus particles.

67. The vector system of any one of claims 63-66, wherein one or more of the one or more n-mer inserts are incorporated into the AAV protein such that at least one or more of the one more RGD motifs and/or at least one or more of the one or more P motifs are each inserted between any two contiguous amino acids independently selected from amino acids 262-269, 327-332, 382-386, 452-460, 488-505, 527-539, 545-558, 581-593, 598-599, 704-714, or any combination thereof in an AAV9 capsid polypeptide or in an analogous position in an AAV1, AAV2, AAV3, AAV4, AAV5, AAV6, AAV7, AAV8, AAV rh.74, AAV rh.10 capsid polypeptide.

68. The vector system of any one of claims 63-67, wherein at least one of the one or more n-mer inserts is incorporated into the AAV protein such that at least one of the one more RGD motifs and/or at least one of the one or more P motifs is inserted between amino acids 588 and 589 in the AAV9 capsid polynucleotide or in an analogous position in an AAV1, AAV2, AAV3, AAV4, AAV5, AAV6, AAV7, AAV8, AAV rh.74, AAV rh.10 capsid polypeptide.

69. The vector system any one of claims 63-68, wherein the AAV capsid protein is an engineered AAV capsid protein having reduced or eliminated uptake in a non-CNS cell or a non-muscle cell as compared to a corresponding wild-type AAV capsid polypeptide.

70. The vector system of claim 69, wherein the non-CNS or non-muscle cell is a liver cell.

71. The vector system of any one of claims 69-70, wherein the wild-type capsid polypeptide is an AAV1, AAV2, AAV3, AAV4, AAV5, AAV6, AAV7, AAV8, AAV9, AAV rh.74, or AAV rh.10 capsid polypeptide.

72. The vector system of any one of claims 69-70, wherein the engineered AAV capsid protein comprises one or more mutations that result in reduced or eliminated uptake in a non-CNS cell.

73. The vector system of claim 72, wherein the one or more mutations are
a. in position 267,
b. in position 269,
c. in position 504,
d. in position 505,
e. in position 590,
f. or any combination thereof
in the AAV9 capsid protein (SEQ ID NO: 1) or in one or more positions corresponding thereto in a non-AAV9 capsid polypeptide.

74. The vector system of claim 73, wherein the non-AAV9 capsid protein is an AAV1, AAV2, AAV3, AAV4, AAV5, AAV6, AAV7, AAV8, AAV rh.74, or AAV rh.10 capsid polypeptide.

75. The vector system of any one of claims 73-74, wherein the mutation in position 267 in the AAV9 capsid protein (SEQ ID NO: 1) or position corresponding thereto in a non-AAV9 capsid polypeptide is a G or X mutation to A, wherein X is any amino acid.

76. The vector system of any one of claims 73-75, wherein the mutation in position 269 in the AAV9 capsid protein (SEQ ID NO: 1) or position corresponding thereto in a non-AAV9 capsid polypeptide is an S or X to T mutation, wherein X is any amino acid.

77. The vector system of any one of claims 73-76, wherein the mutation in position 504 in the AAV9 capsid protein (SEQ ID NO: 1) or position corresponding thereto in a non-AAV9 capsid polypeptide is a G or X to A mutation, wherein X is any amino acid.

78. The vector system of any one of claims 73-77, wherein the mutation in position 505 in the AAV9 capsid protein (SEQ ID NO: 1) or position corresponding thereto in a non-AAV9 capsid polypeptide is a P or X to A mutation, wherein X is any amino acid.

79. The vector system of any one of claims 73-78, wherein the mutation in position 590 in the AAV9 capsid protein (SEQ ID NO: 1) or position corresponding thereto in a non-AAV9 capsid polypeptide is a Q or X to A mutation, wherein X is any amino acid.

80. The vector system of any one of claims 73-79, wherein the engineered AAV capsid protein is an engineered AAV9 capsid polypeptide comprising a mutation at position 267, position 269 or both of a wild-type AAV9 capsid protein (SEQ ID NO: 1), wherein the mutation at position 267 is a G to A mutation and wherein the mutation at position 269 is an S to T mutation.

81. The vector system of any one of claims 73-80, wherein the engineered AAV capsid protein is an engineered AAV9 capsid polypeptide comprising a mutation at position 590 of a wild-type AAV9 capsid protein (SEQ ID NO: 1), wherein the mutation at position 509 is a Q to A mutation.

82. The vector system of any one of claims 73-74, wherein the engineered AAV capsid protein is an engineered AAV9 capsid polypeptide comprising a mutation at position 504, position 505, or both of a wild-type AAV9 capsid protein (SEQ ID NO: 1), wherein the mutation at position 504 is a G to A mutation and wherein the mutation at position 505 is a P to A mutation.

83. The vector system of any one of claims 48-82, wherein the vector comprising the one or more polynucleotides does not comprise splice regulatory elements.

84. The vector system of any one of claims 48-83, further comprising a polynucleotide that encodes a viral rep protein.

85. The vector system of claim 84, wherein the viral rep protein is an AAV rep protein.

86. The vector system of any one of claims 84-85, wherein the polynucleotide that encodes the viral rep protein is on the same vector or a different vector as the one or more polynucleotides.

87. The vector system of any one of claims 84-86, wherein the polynucleotide that encodes the viral rep protein is operatively coupled to a regulatory element.

88. The vector system of any one of claims 48-87, wherein the vector system is capable of producing a composition or portion thereof as in any of claims 1-47.

89. A polypeptide encoded, produced, or both by a vector system as in any of claims 48-88.

90. The polypeptide of claim 89, wherein the polypeptide is a viral polypeptide.

91. The polypeptide of claim 90, wherein the viral polypeptide is an AAV polypeptide.

92. The polypeptide of any one of claims 89-91, wherein the polypeptide is coupled to or otherwise associated with a cargo.

93. A particle produced by a vector system as in any one of claims 48-88, optionally including a polypeptide as in any one of claims 89-92.

94. The particle of claim 93, wherein the particle is a viral particle.

95. The particle of claim 94, wherein the viral particle is an adeno-associated virus (AAV) particle, lentiviral particle, or a retroviral particle.

96. The particle of any one of claims 93-95, wherein the particle comprises a cargo.

97. The particle of any of claims 93-96, wherein the viral particle has a muscle tropism, or a muscle and central nervous system (CNS) tropism.

98. The vector system of any one of claims 48-88, the polypeptide as in any one of claims 89-92, or the particle of any one of claims 93-97, wherein the cargo is capable or preventing a CNS disease or, a muscle disease or disorder, or both a CNS and muscle disease or disorder.

99. The vector system of any one of claims 48-88 or 98, the polypeptide of any one of claims 89-92, or the particle of any one of claims 93-97, wherein the CNS or muscle disease or disorder is (a) an auto immune disease; (b) a cancer; (c) a muscular dystrophy; (d) a neuro-muscular disease; (e) a sugar or glycogen storage disease; (f) an expanded repeat disease; (g) a dominant negative disease; (h) a cardiomyopathy; (i) a viral disease; (j) a progeroid disease; or (k) any combination thereof.

100. The vector system, the polypeptide, or the particle of any one of claims 98-99, wherein the cargo is capable of inducing exon skipping in a gene.

101. The vector system, the polypeptide, or the particle of any one of claims 98-100, wherein the cargo is capable of inducing exon skipping in a dystrophin gene.

102. The vector system, the polypeptide, or the particle of any one of claims 98-101, wherein the cargo is a mini- or micro-dystrophin gene.

103. The vector system, the polypeptide, or the particle of claim 102, wherein the mini- or micro-dystrophin gene comprises spectrin-like repeats 1, 2, 3, and 24, and optionally an nNOS domain.

104. The vector system, the polypeptide, or the particle of any one of claims 98-103, wherein the expanded repeat disease is Huntington's disease, a Myotonic Dystrophy, or Facioscapulohumeral muscular dystrophy (FSHD).

105. The vector system, the polypeptide, or the particle of any one of claims 98-104, wherein the muscular dystrophy is Duchene muscular dystrophy, Becker Muscular dystrophy, a Limb-Girdle muscular dystrophy, an Emery-Dreifuss muscular dystrophy, a myotonic dystrophy, or FSHD.

106. The vector system, the polypeptide, or the particle of claim 105, wherein the myotonic dystrophy is Type 1 or Type 2.

107. The vector system, the polypeptide, or the particle of any of claims 98-106, wherein the cardiomyopathy is dilated cardiomyopathy, hypertrophic cardiomyopathy, DMD-associated cardiomyopathy, or Dannon disease.

108. The vector system, the polypeptide, or the particle of any of claims 98-107, wherein the sugar or glycogen storage disease is a MPS type III disease or Pompe disease.

109. The vector system, the polypeptide, or the particle of claim 108, wherein the MPS type III disease, is MPS Type IIIA, IIIB, IIIC, or IIID.

110. The vector system, the polypeptide, or the particle of any of claims 98-109, wherein the neuro-muscular disease is Charcot-Marie-Tooth disease or Friedreich's Ataxia.

111. The polypeptide or the particle of any one of claims 89-110, wherein the polypeptide, the particle, or both have increased muscle cell potency, muscle cell specificity, reduced immunogenicity, or any combination thereof

112. A cell comprising:
a. a composition as in any of claims 1-47;
b. a vector system as in any one of claims 48-88 or 98-110;
c. a polypeptide as in any one of claims 89-92 or 98-111;
d. a particle of any one of claims 93-111; or
e. a combination thereof.

113. The cell of claim 87, wherein the cell is prokaryotic.

114. The cell of claim 87, wherein the cell is eukaryotic.

115. A pharmaceutical formulation comprising:
a. a composition as in any of claims 1-47;
b. a vector system as in any one of claims 48-88 or 98-110;
c. a polypeptide as in any one of claims 89-92 or 98-111;
d. a particle of any one of claims 93-111;
e. a cell as in any one of claims 99-101; or
f. a combination thereof; and
a pharmaceutically acceptable carrier.

116. A method of treating a muscle disease, disorder, or a symptom thereof, or both a muscle and a central nervous system disease, disorder, or a symptom thereof comprising:
administering, to the subject in need thereof,
a. a composition as in any of claims 1-47;
b. a vector system as in any one of claims 48-88 or 98-110;
c. a polypeptide as in any one of claims 89-92 or 98-111;
d. a particle of any one of claims 93-111;
e. a cell as in any one of claims 99-101;
f. a pharmaceutical formulation as in claim 102; or
g. a combination thereof.

117. The method of claim 116, wherein the central nervous system disease or disorder comprises a secondary muscle disease, disorder, or symptom thereof.

118. The method of any one of claims 116-117, wherein the central nervous system disease or disorder is Friedreich's Ataxia, Dravet Syndrome, Spinocerebellar Ataxia Type 3, Niemann Pick Type C, Huntington's Disease, Pompe Disease, Myotonic Dystrophy Type 1, Glut1 Deficiency Syndrome (De Vivo Syndrome), Tay-Sachs, Spinal Muscular Atrophy, Alzheimer's disease, Amyotrophic lateral sclerosis (ALS), Danon disease, Rett Syndrome, Angleman Syndrome, or a combination thereof.

119. The method of any one of claims 116-118, wherein the CNS or muscle disease or disorder is (a) an auto immune disease; (b) a cancer; (c) a muscular dystrophy; (d) a neuro-muscular disease; (e) a sugar or glycogen storage disease; (f) an expanded repeat disease; (g) a dominant negative disease; (h) a cardiomyopathy; (i) a viral disease; (j) a progeroid disease; or (k) any combination thereof.

120. The method of any one of claims 116-119, wherein the expanded repeat disease is Huntington's disease, a Myotonic Dystrophy, or Facioscapulohumeral muscular dystrophy (FSHD).

121. The method of any one of claims 116-120, wherein the muscular dystrophy is Duchene muscular dystrophy, Becker Muscular dystrophy, a Limb-Girdle muscular dystrophy, an Emery-Dreifuss muscular dystrophy, a myotonic dystrophy, or FSHD.

122. The method of claim 116, wherein the myotonic dystrophy is Type 1 or Type 2.

123. The method of any one of claims 116-122, wherein the cardiomyopathy is dilated cardiomyopathy, hypertrophic cardiomyopathy, DMD-associated cardiomyopathy, or Dannon disease.

124. The method of any one of claims 116-123, wherein the sugar or glycogen storage disease is a MPS type III disease or Pompe disease.

125. The method of claim 124, wherein the MPS type III disease, is MPS Type IIIA, IIIB, IIIC, or HID.

126. The method of any of claims 116-125, wherein the neuro-muscular disease is Charcot-Marie-Tooth disease or Friedreich's Ataxia.

The application's sequence listing, which the Patent Office published only in electronic form, follows.

SEQUENCE LISTING (1710 sequences)

SEQ ID NO: 1 - protein, 736 aa, Adeno associated virus
MAADGYLPDWLEDNLSEGIREWWALKPGAPQPKANQQHQDNARGLVLPGYKYLGPGNGLDKGEPVNAADAAALEHDKAYDQQLKAGDNPYLKYNHADAEFQERLKEDTSFGGNLGRAVFQAKKRLLEPLGLVEEAAKTAPGKKRPVEQSPQEPDSSAGIGKSGAQPAKKRLNFGQTGDTESVPDPQPIGEPPAAPSGVGSLTMASGGGAPVADNNEGADGVGSSSGNWHCDSQWLGDRVITTSTRTWALPTYNNHLYKQISNSTSGGSSNDNAYFGYSTPWGYFDFNRFHCHFSPRDWQRLINNNWGFRPKRLNFKLFNIQVKEVTDNNGVKTIANNLTSTVQVFTDSDYQLPYVLGSAHEGCLPPFPADVFMIPQYGYLTLNDGSQAVGRSSFYCLEYFPSQMLRTGNNFQFSYEFENVPFHSSYAHSQSLDRLMNPLIDQYLYYLSKTINGSGQNQQTLKFSVAGPSNMAVQGRNYIPGPSYRQQRVSTTVTQNNNSEFAWPGASSWALNGRNSLMNPGPAMASHKEGEDRFFPLSGSLIFGKQGTGRDNVDADKVMITNEEEIKTTNPVATESYGQVATNHQSAQAQAQTGWVQNQGILPGMVWQDRDVYLQGPIWAKIPHTDGNFHPSPLMGGFGMKHPPPQILIKNTPVPADPPTAFNKDKLNSFITQYSTGQVSVEIEWELQKENSKRWNPEIQYTSNYYKSNNVEFAVNTEGVYSEPRPIGTRYLTRNL

SEQ ID NO: 2 - protein, 736 aa, Adeno associated virus
MAADGYLPDWLEDNLSEGIREWWALKPGAPQPKANQQHQDNARGLVLPGYKVLGPGNGLDKGEPVNAADAAALEHDKAYDQQLKAGDNPYLKYNHADAEFQERLKEDTSFGGNLGRAVFQAKKRLLEPLGLVEEAAKTAPGKKRPVEQSPQEPDSSAGIGKSGAQPAKKRLNFGQTGDTESVPDPQPIGEPPAAPSGVGSLTMASGGGAPVADNNEGADGVGSSSGNWHCDSQWLGDRVITTSTRTWALPTYNNHLYKQISNSTSGASSNDNAYFGYSTPWGYFDFNRFHCHFSPRDWQRLINNNWGFRPKRLNFKLFNIQVKEVTDNNGVKTIANNLTSTVQVFTDSDYQLPYVLGSAHEGCLPPFPADVFMIPQYGYLTLNDGSQAVGRSSFYCLEYFPSQMLRTGNNFQFSYEFENVPFHSSYAHSQSLDRLMNPLIDQYLYYLSKTINGSGQNQQTLKFSVAGPSNMAVQGRNYIPGPSYRQQRVSTTVTQNNNSEFAWPGASSWALNGRNSLMNPGPAMASHKEGEDRFFPLSGSLIFGKQGTGRDNVDADKVMITNEEEIKTTNPVATESYGQVATNHQSAQAQAQTGWVQNQGILPGMVWQDRDVYLQGPIWAKIPHTDGNFHPSPLMGGFGMKHPPPQILIKNTPVPADPPTAFNKDKLNSFITQYSTGQVSVEIEWELQKENSKRWNPEIQYTSNYYKSNNVEFAVNTEGVYSEPRPIGTRYLTRNL

SEQ ID NO: 3 - protein, 736 aa, Adeno associated virus
MAADGYLPDWLEDNLSEGIREWWALKPGAPQPKANQQHQDNARGLVLPGYKVLGPGNGLDKGEPVNAADAAALEHDKAYDQQLKAGDNPYLKYNHADAEFQERLKEDTSFGGNLGRAVFQAKKRLLEPLGLVEEAAKTAPGKKRPVEQSPQEPDSSAGIGKSGAQPAKKRLNFGQTGDTESVPDPQPIGEPPAAPSGVGSLTMASGGGAPVADNNEGADGVGSSSGNWHCDSQWLGDRVITTSTRTWALPTYNNHLYKQISNSTSGASTNDNAYFGYSTPWGYFDFNRFHCHFSPRDWQRLINNNWGFRPKRLNFKLFNIQVKEVTDNNGVKTIANNLTSTVQVFTDSDYQLPYVLGSAHEGCLPPFPADVFMIPQYGYLTLNDGSQAVGRSSFYCLEYFPSQMLRTGNNFQFSYEFENVPFHSSYAHSQSLDRLMNPLIDQYLYYLSKTINGSGQNQQTLKFSVAGPSNMAVQGRNYIPGPSYRQQRVSTTVTQNNNSEFAWPGASSWALNGRNSLMNPGPAMASHKEGEDRFFPLSGSLIFGKQGTGRDNVDADKVMITNEEEIKTTNPVATESYGQVATNHQSAQAQAQTGWVQNQGILPGMVWQDRDVYLQGPIWAKIPHTDGNFHPSPLMGGFGMKHPPPQILIKNTPVPADPPTAFNKDKLNSFITQYSTGQVSVEIEWELQKENSKRWNPEIQYTSNYYKSNNVEFAVNTEGVYSEPRPIGTRYLTRNL

SEQ ID NO: 4 - protein, 10 aa, synthetic construct
  REGION 1..10: note = Synthetic
TTGRGDQARL

SEQ ID NO: 5 - protein, 10 aa, synthetic construct
  REGION 1..10: note = Synthetic
TTLRGDHSQL

SEQ ID NO: 6 - protein, 10 aa, synthetic construct
  REGION 1..10: note = Synthetic
TNLRGDYQLT

SEQ ID NO: 7 - protein, 10 aa, synthetic construct
  REGION 1..10: note = Synthetic
STSRGDYVTH

SEQ ID NO: 8 - protein, 10 aa, synthetic construct
  REGION 1..10: note = Synthetic
MPARGDLVQT

SEQ ID NO: 9 - protein, 10 aa, synthetic construct
  REGION 1..10: note = Synthetic
SGVRGDRLAV

SEQ ID NO: 10 - protein, 10 aa, synthetic construct
  REGION 1..10: note = Synthetic
SNERGDQHRL

SEQ ID NO: 11 - protein, 10 aa, synthetic construct
  REGION 1..10: note = Synthetic
STLRGDYAVS

SEQ ID NO: 12 - protein, 10 aa, synthetic construct
  REGION 1..10: note = Synthetic
SNARGDIMTT

SEQ ID NO: 13 - protein, 10 aa, synthetic construct
  REGION 1..10: note = Synthetic
EASRGDLQMR

SEQ ID NO: 14 - protein, 10 aa, synthetic construct
  REGION 1..10: note = Synthetic
TYARGDLSGH

SEQ ID NO: 15 - protein, 10 aa, synthetic construct
  REGION 1..10: note = Synthetic
DSSRGDRSSV

SEQ ID NO: 16 - protein, 10 aa, synthetic construct
  REGION 1..10: note = Synthetic
SQSRGDLVPL

SEQ ID NO: 17 - protein, 10 aa, synthetic construct
  REGION 1..10: note = Synthetic
SATRGDYSIL

SEQ ID NO: 18 - protein, 10 aa, synthetic construct
  REGION 1..10: note = Synthetic
QATRGDLQHT

SEQ ID NO: 19 - protein, 10 aa, synthetic construct
  REGION 1..10: note = Synthetic
HDDRGDRRML

SEQ ID NO: 20 - protein, 10 aa, synthetic construct
  REGION 1..10: note = Synthetic
SSHRGDLLAT

SEQ ID NO: 21 - protein, 10 aa, synthetic construct
  REGION 1..10: note = Synthetic
SYQRGDQHNM

SEQ ID NO: 22 - protein, 10 aa, synthetic construct
  REGION 1..10: note = Synthetic
SHQRGDYNTL

SEQ ID NO: 23 - protein, 10 aa, synthetic construct
  REGION 1..10: note = Synthetic
MDQRGDMSVV

SEQ ID NO: 24 - protein, 10 aa, synthetic construct
  REGION 1..10: note = Synthetic
QIARGDLHVP

SEQ ID NO: 25 - protein, 10 aa, synthetic construct
  REGION 1..10: note = Synthetic
TYTRGDQHMM

SEQ ID NO: 26 - protein, 10 aa, synthetic construct
  REGION 1..10: note = Synthetic
DASRGDRTSL

SEQ ID NO: 27 - protein, 10 aa, synthetic construct
  REGION 1..10: note = Synthetic
SDRRGDLHPQ

SEQ ID NO: 28 - protein, 10 aa, synthetic construct
  REGION 1..10: note = Synthetic
SATRGDHSTL

SEQ ID NO: 29 - protein, 10 aa, synthetic construct
  REGION 1..10: note = Synthetic
AYQRGDFTSV

SEQ ID NO: 30 - protein, 10 aa, synthetic construct
  REGION 1..10: note = Synthetic
TGNRGDLQSV

SEQ ID NO: 31 - protein, 10 aa, synthetic construct
  REGION 1..10: note = Synthetic
AWRRGDLENA

SEQ ID NO: 32 - protein, 10 aa, synthetic construct
  REGION 1..10: note = Synthetic
NAARGDHGLL

SEQ ID NO: 33 - protein, 10 aa, synthetic construct
  REGION 1..10: note = Synthetic
SYSRGDHQAL

SEQ ID NO: 34 - protein, 10 aa, synthetic construct
  REGION 1..10: note = Synthetic
DGVRGDRTVV

SEQ ID NO: 35 - protein, 10 aa, synthetic construct
  REGION 1..10: note = Synthetic
SSERGDKMST

SEQ ID NO: 36 - protein, 10 aa, synthetic construct
  REGION 1..10: note = Synthetic
TSMRGDYTHV

SEQ ID NO: 37 - protein, 10 aa, synthetic construct
  REGION 1..10: note = Synthetic
SGVRGDRIII

SEQ ID NO: 38 - protein, 10 aa, synthetic construct
  REGION 1..10: note = Synthetic
ENRRGDAQLL

SEQ ID NO: 39 - protein, 10 aa, synthetic construct
  REGION 1..10: note = Synthetic
TVYRGDREQH

SEQ ID NO: 40 - protein, 10 aa, synthetic construct
  REGION 1..10: note = Synthetic
LDRRGDLLNS

SEQ ID NO: 41 - protein, 10 aa, synthetic construct
  REGION 1..10: note = Synthetic
ESVRGDLRST

SEQ ID NO: 42 - protein, 10 aa, synthetic construct
  REGION 1..10: note = Synthetic
DKYRGDQRGL

SEQ ID NO: 43 - protein, 10 aa, synthetic construct
  REGION 1..10: note = Synthetic
TDRRGDAHIL

SEQ ID NO: 44 - protein, 10 aa, synthetic construct
  REGION 1..10: note = Synthetic
SQTRGDTSLM

SEQ ID NO: 45 - protein, 10 aa, synthetic construct
  REGION 1..10: note = Synthetic
DATRGDTRML

SEQ ID NO: 46 - protein, 10 aa, synthetic construct
  REGION 1..10: note = Synthetic
SMQRGDLTHA

SEQ ID NO: 47 - protein, 10 aa, synthetic construct
  REGION 1..10: note = Synthetic
SGTRGDTLIL

SEQ ID NO: 48 - protein, 10 aa, synthetic construct
  REGION 1..10: note = Synthetic
ANTRGDHQNF

SEQ ID NO: 49 - protein, 10 aa, synthetic construct
  REGION 1..10: note = Synthetic
TSQRGDHTQL

SEQ ID NO: 50 - protein, 10 aa, synthetic construct
  REGION 1..10: note = Synthetic
SHWRGDTSSL

SEQ ID NO: 51 - protein, 10 aa, synthetic construct
  REGION 1..10: note = Synthetic
ISGRGDRQEL

SEQ ID NO: 52 - protein, 10 aa, synthetic construct
  REGION 1..10: note = Synthetic
SVLRGDIGTI

SEQ ID NO: 53 - protein, 10 aa, synthetic construct
  REGION 1..10: note = Synthetic
QDSRGDLSGK

SEQ ID NO: 54 - protein, 10 aa, synthetic construct
  REGION 1..10: note = Synthetic
KPIRGDGAEL

SEQ ID NO: 55 - protein, 10 aa, synthetic construct
  REGION 1..10: note = Synthetic
TYMRGDLQHT

SEQ ID NO: 56 - protein, 10 aa, synthetic construct
  REGION 1..10: note = Synthetic
TELRGDLSST

SEQ ID NO: 57 - protein, 10 aa, synthetic construct
  REGION 1..10: note = Synthetic
SAMRGDHAVL

SEQ ID NO: 58 - protein, 10 aa, synthetic construct
  REGION 1..10: note = Synthetic
SWVRGDASTL

SEQ ID NO: 59 - protein, 10 aa, synthetic construct
  REGION 1..10: note = Synthetic
QYARGDPHAL

SEQ ID NO: 60 - protein, 10 aa, synthetic construct
  REGION 1..10: note = Synthetic
STNRGDIVVH

SEQ ID NO: 61 - protein, 10 aa, synthetic construct
  REGION 1..10: note = Synthetic
VNIRGDLHQT

SEQ ID NO: 62 - protein, 10 aa, synthetic construct
  REGION 1..10: note = Synthetic
REYRGDSSIL

SEQ ID NO: 63 - protein, 10 aa, synthetic construct
  REGION 1..10: note = Synthetic
STLRGDGSMM

SEQ ID NO: 64 - protein, 10 aa, synthetic construct
  REGION 1..10: note = Synthetic
SSQRGDITAH

SEQ ID NO: 65 - protein, 10 aa, synthetic construct
  REGION 1..10: note = Synthetic
TEFRGDRSTV

SEQ ID NO: 66 - protein, 10 aa, synthetic construct
  REGION 1..10: note = Synthetic
TSTRGDYVTV

SEQ ID NO: 67 - protein, 10 aa, synthetic construct
  REGION 1..10: note = Synthetic
NHLRGDVSAI

SEQ ID NO: 68 - protein, 10 aa, synthetic construct
  REGION 1..10: note = Synthetic
LERRGDLVST

SEQ ID NO: 69 - protein, 10 aa, synthetic construct
  REGION 1..10: note = Synthetic
NEYRGDHSHP

SEQ ID NO: 70 - protein, 10 aa, synthetic construct
  REGION 1..10: note = Synthetic
NWQRGDTSTL

SEQ ID NO: 71 - protein, 10 aa, synthetic construct
  REGION 1..10: note = Synthetic
TDSRGDRTVL

SEQ ID NO: 72 - protein, 10 aa, synthetic construct
  REGION 1..10: note = Synthetic
YAVRGDQHTI

SEQ ID NO: 73 - protein, 10 aa, synthetic construct
  REGION 1..10: note = Synthetic
FGVRGDTRDL

SEQ ID NO: 74 - protein, 10 aa, synthetic construct
  REGION 1..10: note = Synthetic
SSARGDTGML

SEQ ID NO: 75 - protein, 10 aa, synthetic construct
  REGION 1..10: note = Synthetic
SAMRGDQMGQ

SEQ ID NO: 76 - protein, 10 aa, synthetic construct
  REGION 1..10: note = Synthetic
SHTRGDLVTT

SEQ ID NO: 77 - protein, 10 aa, synthetic construct
  REGION 1..10: note = Synthetic
VTTRGDTAIL

SEQ ID NO: 78 - protein, 10 aa, synthetic construct
  REGION 1..10: note = Synthetic
EPTRGDRHSI

SEQ ID NO: 79 - protein, 10 aa, synthetic construct
  REGION 1..10: note = Synthetic
GSQRGDRLVL

SEQ ID NO: 80 - protein, 10 aa, synthetic construct
  REGION 1..10: note = Synthetic
QHYRGDLSTT

SEQ ID NO: 81 - protein, 10 aa, synthetic construct
  REGION 1..10: note = Synthetic
METRGDRQQL

SEQ ID NO: 82 - protein, 10 aa, synthetic construct
  REGION 1..10: note = Synthetic
EALRGDKVVL

SEQ ID NO: 83 - protein, 10 aa, synthetic construct
  REGION 1..10: note = Synthetic
NAVRGDQSYV

SEQ ID NO: 84 - protein, 10 aa, synthetic construct
  REGION 1..10: note = Synthetic
SPLRGDNRAL

SEQ ID NO: 85 - protein, 10 aa, synthetic construct
  REGION 1..10: note = Synthetic
ENRRGDTHAL

SEQ ID NO: 86 - protein, 10 aa, synthetic construct
  REGION 1..10: note = Synthetic
NSQRGDLTGT

SEQ ID NO: 87 - protein, 9 aa, synthetic construct
  REGION 1..9: note = Synthetic
QYAPSQGTV

SEQ ID NO: 88 - protein, 10 aa, synthetic construct
  REGION 1..10: note = Synthetic
DNSRGDHSRL

SEQ ID NO: 89 - protein, 10 aa, synthetic construct
  REGION 1..10: note = Synthetic
NTHRGDYASI

SEQ ID NO: 90 - protein, 10 aa, synthetic construct
  REGION 1..10: note = Synthetic
HTTRGDQQPL

SEQ ID NO: 91 - protein, 10 aa, synthetic construct
  REGION 1..10: note = Synthetic
EWRRGDQTAL

SEQ ID NO: 92 - protein, 10 aa, synthetic construct
  REGION 1..10: note = Synthetic
TAVRGDQTTV

SEQ ID NO: 93 - protein, 10 aa, synthetic construct
  REGION 1..10: note = Synthetic
EYLRGDRISQ

SEQ ID NO: 94 - protein, 10 aa, synthetic construct
  REGION 1..10: note = Synthetic
SRYRGDQETI

SEQ ID NO: 95 - protein, 10 aa, synthetic construct
  REGION 1..10: note = Synthetic
ASLRGDTVTL

SEQ ID NO: 96 - protein, 10 aa, synthetic construct
  REGION 1..10: note = Synthetic
VGVRGDSHVL

SEQ ID NO: 97 - protein, 10 aa, synthetic construct
  REGION 1..10: note = Synthetic
TNSRGDHTSL

SEQ ID NO: 98 - protein, 10 aa, synthetic construct
  REGION 1..10: note = Synthetic
VDQRGDQRAL

SEQ ID NO: 99 - protein, 10 aa, synthetic construct
  REGION 1..10: note = Synthetic
ASVRGDRLDV

SEQ ID NO: 100 - protein, 10 aa, synthetic construct
  REGION 1..10: note = Synthetic
TSYRGDLSSN

SEQ ID NO: 101 - protein, 10 aa, synthetic construct
  REGION 1..10: note = Synthetic
TSDRGDSSNR

SEQ ID NO: 102 - protein, 10 aa, synthetic construct
  REGION 1..10: note = Synthetic
SYMRGDLDMR

SEQ ID NO: 103 - protein, 10 aa, synthetic construct
  REGION 1..10: note = Synthetic
TDVRGDRSMI

SEQ ID NO: 104 - protein, 10 aa, synthetic construct
  REGION 1..10: note = Synthetic
SYVRGDSSTV

SEQ ID NO: 105 - protein, 10 aa, synthetic construct
  REGION 1..10: note = Synthetic
QVYRGDRESV

SEQ ID NO: 106 - protein, 10 aa, synthetic construct
  REGION 1..10: note = Synthetic
TDRRGDAVSF

SEQ ID NO: 107 - protein, 10 aa, synthetic construct
  REGION 1..10: note = Synthetic
TNSRGDLHTT

SEQ ID NO: 108 - protein, 10 aa, synthetic construct
  REGION 1..10: note = Synthetic
EAIRGDFKTL

SEQ ID NO: 109 - protein, 10 aa, synthetic construct
  REGION 1..10: note = Synthetic
TGIRGDTAGL

SEQ ID NO: 110 - protein, 10 aa, synthetic construct
  REGION 1..10: note = Synthetic
TSSRGDVQSL

SEQ ID NO: 111 - protein, 10 aa, synthetic construct
  REGION 1..10: note = Synthetic
SSRRGDTNEL

SEQ ID NO: 112 - protein, 10 aa, synthetic construct
  REGION 1..10: note = Synthetic
SNARGDHTPL

SEQ ID NO: 113 - protein, 10 aa, synthetic construct
  REGION 1..10: note = Synthetic
SELRGDRSPY

SEQ ID NO: 114 - protein, 10 aa, synthetic construct
  REGION 1..10: note = Synthetic
VHARGDTSIM

SEQ ID NO: 115 - protein, 10 aa, synthetic construct
  REGION 1..10: note = Synthetic
SALRGDHGTL

SEQ ID NO: 116 - protein, 10 aa, synthetic construct
  REGION 1..10: note = Synthetic
QTGRGDIAGM

SEQ ID NO: 117 - protein, 10 aa, synthetic construct
  REGION 1..10: note = Synthetic
TVARGDQIRL

SEQ ID NO: 118 - protein, 10 aa, synthetic construct
  REGION 1..10: note = Synthetic
TNSRGDSVAL

SEQ ID NO: 119 - protein, 10 aa, synthetic construct
  REGION 1..10: note = Synthetic
QNARGDSAVI

SEQ ID NO: 120 - protein, 10 aa, synthetic construct
  REGION 1..10: note = Synthetic
HYLRGDTTTL

SEQ ID NO: 121 - protein, 10 aa, synthetic construct
  REGION 1..10: note = Synthetic
ANARGDLQNT

SEQ ID NO: 122 - protein, 10 aa, synthetic construct
  REGION 1..10: note = Synthetic
QNIRGDIRTV

SEQ ID NO: 123 - protein, 10 aa, synthetic construct
  REGION 1..10: note = Synthetic
AALRGDHGQM

SEQ ID NO: 124 - protein, 10 aa, synthetic construct
  REGION 1..10: note = Synthetic
TTDRGDLSAR

SEQ ID NO: 125 - protein, 10 aa, synthetic construct
  REGION 1..10: note = Synthetic
LNVRGDLVHT

SEQ ID NO: 126 - protein, 10 aa, synthetic construct
  REGION 1..10: note = Synthetic
YSTRGDHTVL

SEQ ID NO: 127 - protein, 10 aa, synthetic construct
  REGION 1..10: note = Synthetic
TNARGDLTVS

SEQ ID NO: 128 - protein, 10 aa, synthetic construct
  REGION 1..10: note = Synthetic
TNARGDYTAL

SEQ ID NO: 129 - protein, 10 aa, synthetic construct
  REGION 1..10: note = Synthetic
AEGRGDTRGS

SEQ ID NO: 130 - protein, 10 aa, synthetic construct
  REGION 1..10: note = Synthetic
TNIRGDQSSV

SEQ ID NO: 131 - protein, 10 aa, synthetic construct
  REGION 1..10: note = Synthetic
VDRRGDTMTM

SEQ ID NO: 132 - protein, 10 aa, synthetic construct
  REGION 1..10: note = Synthetic
QIGRGDVTPL

SEQ ID NO: 133 - protein, 10 aa, synthetic construct
  REGION 1..10: note = Synthetic
MQARGDLLGV

SEQ ID NO: 134 - protein, 10 aa, synthetic construct
  REGION 1..10: note = Synthetic
NTQRGDYASV

SEQ ID NO: 135 - protein, 10 aa, synthetic construct
  REGION 1..10: note = Synthetic
SDTRGDRITQ

SEQ ID NO: 136 - protein, 10 aa, synthetic construct
  REGION 1..10: note = Synthetic
SAIRGDYRDV

SEQ ID NO: 137 - protein, 10 aa, synthetic construct
  REGION 1..10: note = Synthetic
VGVRGDVHPL

SEQ ID NO: 138 - protein, 10 aa, synthetic construct
  REGION 1..10: note = Synthetic
TVLRGDAERL

SEQ ID NO: 139 - protein, 10 aa, synthetic construct
  REGION 1..10: note = Synthetic
ASTRGDLSGQ

SEQ ID NO: 140 - protein, 10 aa, synthetic construct
  REGION 1..10: note = Synthetic
DSRRGDGQNL

SEQ ID NO: 141 - protein, 10 aa, synthetic construct
  REGION 1..10: note = Synthetic
IDKRGDIQGL

SEQ ID NO: 142 - protein, 10 aa, synthetic construct
  REGION 1..10: note = Synthetic
TVTRGDLLVN

SEQ ID NO: 143 - protein, 10 aa, synthetic construct
  REGION 1..10: note = Synthetic
DSTRGDRLGL

SEQ ID NO: 144 - protein, 10 aa, synthetic construct
  REGION 1..10: note = Synthetic
AANRGDYASL

SEQ ID NO: 145 - protein, 10 aa, synthetic construct
  REGION 1..10: note = Synthetic
RDYRGDTSSL

SEQ ID NO: 146 - protein, 10 aa, synthetic construct
  REGION 1..10: note = Synthetic
SNIRGDASLH

SEQ ID NO: 147 - protein, 10 aa, synthetic construct
  REGION 1..10: note = Synthetic
NLQRGDRTDF

SEQ ID NO: 148 - protein, 10 aa, synthetic construct
  REGION 1..10: note = Synthetic
NASRGDHSSM

SEQ ID NO: 149 - protein, 10 aa, synthetic construct
  REGION 1..10: note = Synthetic
TSMRGDYTHV

SEQ ID NO: 150 - protein, 10 aa, synthetic construct
  REGION 1..10: note = Synthetic
TSRRGDLNDV

SEQ ID NO: 151 - protein, 10 aa, synthetic construct
  REGION 1..10: note = Synthetic
QSHRGDVQSL

SEQ ID NO: 152 - protein, 10 aa, synthetic construct
  REGION 1..10: note = Synthetic
STTRGDYQSV

SEQ ID NO: 153 - protein, 10 aa, synthetic construct
  REGION 1..10: note = Synthetic
YSTRGDHAML

SEQ ID NO: 154 - protein, 10 aa, synthetic construct
  REGION 1..10: note = Synthetic
TSARGDLIHT

SEQ ID NO: 155 - protein, 10 aa, synthetic construct
  REGION 1..10: note = Synthetic
ATARGDRESF

SEQ ID NO: 156 - protein, 10 aa, synthetic construct
  REGION 1..10: note = Synthetic
ASTRGDYSTM

SEQ ID NO: 157 - protein, 10 aa, synthetic construct
  REGION 1..10: note = Synthetic
SNNRGDVQRL

SEQ ID NO: 158 - protein, 10 aa, synthetic construct
  REGION 1..10: note = Synthetic
ERLRGDQHII

SEQ ID NO: 159 - protein, 10 aa, synthetic construct
  REGION 1..10: note = Synthetic
SSIRGDHATL

SEQ ID NO: 160 - protein, 10 aa, synthetic construct
  REGION 1..10: note = Synthetic
NPTRGDIATV

SEQ ID NO: 161 - protein, 10 aa, synthetic construct
  REGION 1..10: note = Synthetic
MSTRGDLSVN

SEQ ID NO: 162 - protein, 10 aa, synthetic construct
  REGION 1..10: note = Synthetic
MDRRGDITYA

SEQ ID NO: 163 - protein, 10 aa, synthetic construct
  REGION 1..10: note = Synthetic
NATRGDLMSA

SEQ ID NO: 164 - protein, 10 aa, synthetic construct
  REGION 1..10: note = Synthetic
SDHRGDRTYQ

SEQ ID NO: 165 - protein, 10 aa, synthetic construct
  REGION 1..10: note = Synthetic
NWVRGDLSTA

SEQ ID NO: 166 - protein, 10 aa, synthetic construct
  REGION 1..10: note = Synthetic
SSHRGDLSAT

SEQ ID NO: 167 - protein, 10 aa, synthetic construct
  REGION 1..10: note = Synthetic
NATRGDYREI

SEQ ID NO: 168 - protein, 10 aa, synthetic construct
  REGION 1..10: note = Synthetic
DTLRGDLQTA

SEQ ID NO: 169 - protein, 10 aa, synthetic construct
  REGION 1..10: note = Synthetic
IAVRGDLTPV

SEQ ID NO: 170 - protein, 10 aa, synthetic construct
  REGION 1..10: note = Synthetic
TLLRGDLAHS

SEQ ID NO: 171 - protein, 10 aa, synthetic construct
  REGION 1..10: note = Synthetic
MNTRGDHTVL

SEQ ID NO: 172 - protein, 10 aa, synthetic construct
  REGION 1..10: note = Synthetic
TGHRGDIAVY

SEQ ID NO: 173 - protein, 10 aa, synthetic construct
  REGION 1..10: note = Synthetic
TSNRGDQMSN

SEQ ID NO: 174 - protein, 10 aa, synthetic construct
  REGION 1..10: note = Synthetic
SATRGDHTAI

SEQ ID NO: 175 - protein, 10 aa, synthetic construct
  REGION 1..10: note = Synthetic
SSVRGDREHA

SEQ ID NO: 176 - protein, 10 aa, synthetic construct
  REGION 1..10: note = Synthetic
TNSRGDLVVH

SEQ ID NO: 177 - protein, 10 aa, synthetic construct
  REGION 1..10: note = Synthetic
ETRRGDLSSQ

SEQ ID NO: 178 - protein, 10 aa, synthetic construct
  REGION 1..10: note = Synthetic
TYARGDITLT

SEQ ID NO: 179 - protein, 10 aa, synthetic construct
  REGION 1..10: note = Synthetic
SASRGDTLHL

SEQ ID NO: 180 - protein, 10 aa, synthetic construct
  REGION 1..10: note = Synthetic
DNQRGDLSSR

SEQ ID NO: 181 - protein, 10 aa, synthetic construct
  REGION 1..10: note = Synthetic
TQSRGDLRDA

SEQ ID NO: 182 - protein, 10 aa, synthetic construct
  REGION 1..10: note = Synthetic
ENRRGDLTNA

SEQ ID NO: 183 - protein, 10 aa, synthetic construct
  REGION 1..10: note = Synthetic
TSIRGDISSV

SEQ ID NO: 184 - protein, 10 aa, synthetic construct
  REGION 1..10: note = Synthetic
ISARGDTMTL

SEQ ID NO: 185 - protein, 10 aa, synthetic construct
  REGION 1..10: note = Synthetic
SRVRGDQDHW

SEQ ID NO: 186 - protein, 10 aa, synthetic construct
  REGION 1..10: note = Synthetic
SGNRGDIASY

SEQ ID NO: 187 - protein, 10 aa, synthetic construct
  REGION 1..10: note = Synthetic
NEQRGDRYNH

SEQ ID NO: 188 - protein, 10 aa, synthetic construct
  REGION 1..10: note = Synthetic
EALRGDVRAL

SEQ ID NO: 189 - protein, 10 aa, synthetic construct
  REGION 1..10: note = Synthetic
VDRRGDYTQM

SEQ ID NO: 190 - protein, 10 aa, synthetic construct
  REGION 1..10: note = Synthetic
NNVRGDYTSV

SEQ ID NO: 191 - protein, 10 aa, synthetic construct
  REGION 1..10: note = Synthetic
QTYRGDASVL

SEQ ID NO: 192 - protein, 10 aa, synthetic construct
  REGION 1..10: note = Synthetic
SNYRGDHGSL

SEQ ID NO: 193 - protein, 10 aa, synthetic construct
  REGION 1..10: note = Synthetic
TSSRGDLREV

SEQ ID NO: 194 - protein, 10 aa, synthetic construct
  REGION 1..10: note = Synthetic
QYTRGDVSNL

SEQ ID NO: 195 - protein, 10 aa, synthetic construct
  REGION 1..10: note = Synthetic
SDLRGDVRER

SEQ ID NO: 196 - protein, 10 aa, synthetic construct
  REGION 1..10: note = Synthetic
QNARGDTTAL

SEQ ID NO: 197 - protein, 10 aa, synthetic construct
  REGION 1..10: note = Synthetic
NSLRGDRDTM

SEQ ID NO: 198 - protein, 10 aa, synthetic construct
  REGION 1..10: note = Synthetic
SNSRGDQAQV

SEQ ID NO: 199 - protein, 10 aa, synthetic construct
  REGION 1..10: note = Synthetic
EATRGDRSTL

SEQ ID NO: 200 - protein, 10 aa, synthetic construct
  REGION 1..10: note = Synthetic
VPQRGDITNL

SEQ ID NO: 201 - protein, 10 aa, synthetic construct
  REGION 1..10: note = Synthetic
DKIRGDLRSI

SEQ ID NO: 202 - protein, 10 aa, synthetic construct
  REGION 1..10: note = Synthetic
SAARGDYSIV

SEQ ID NO: 203 - protein, 10 aa, synthetic construct
  REGION 1..10: note = Synthetic
VGLRGDLIGQ

SEQ ID NO: 204 - protein, 10 aa, synthetic construct
  REGION 1..10: note = Synthetic
QAGRGDLTVI

SEQ ID NO: 205 - protein, 10 aa, synthetic construct
  REGION 1..10: note = Synthetic
SKTRGDFQEA

SEQ ID NO: 206 - protein, 10 aa, synthetic construct
  REGION 1..10: note = Synthetic
GTARGDYSML

SEQ ID NO: 207 - protein, 10 aa, synthetic construct
  REGION 1..10: note = Synthetic
ISTRGDLVTI

SEQ ID NO: 208 - protein, 10 aa, synthetic construct
  REGION 1..10: note = Synthetic
TGTRGDREYM

SEQ ID NO: 209 - protein, 10 aa, synthetic construct
  REGION 1..10: note = Synthetic
MTTRGDLSIT

SEQ ID NO: 210 - protein, 10 aa, synthetic construct
  REGION 1..10: note = Synthetic
STSRGDMTSV

SEQ ID NO: 211 - protein, 10 aa, synthetic construct
  REGION 1..10: note = Synthetic
GPARGDFTSS

SEQ ID NO: 212 - protein, 10 aa, synthetic construct
  REGION 1..10: note = Synthetic
VDRRGDLGHV

SEQ ID NO: 213 - protein, 10 aa, synthetic construct
  REGION 1..10: note = Synthetic
NSGRGDMSQL

SEQ ID NO: 214 - protein, 10 aa, synthetic construct
  REGION 1..10: note = Synthetic
SQGRGDLERY

SEQ ID NO: 215 - protein, 10 aa, synthetic construct
  REGION 1..10: note = Synthetic
VFGRGDQYTL

SEQ ID NO: 216 - protein, 10 aa, synthetic construct
  REGION 1..10: note = Synthetic
IVGRGDLHLQ

SEQ ID NO: 217 - protein, 10 aa, synthetic construct
  REGION 1..10: note = Synthetic
SYSRGDTSRL

SEQ ID NO: 218 - protein, 10 aa, synthetic construct
  REGION 1..10: note = Synthetic
MSSRGDRATI

SEQ ID NO: 219 - protein, 10 aa, synthetic construct
  REGION 1..10: note = Synthetic
MSSRGDLTRV

SEQ ID NO: 220 - protein, 10 aa, synthetic construct
  REGION 1..10: note = Synthetic
QHTRGDFGNL

SEQ ID NO: 221 - protein, 10 aa, synthetic construct
  REGION 1..10: note = Synthetic
ETRRGDLSSQ

SEQ ID NO: 222 - protein, 10 aa, synthetic construct
  REGION 1..10: note = Synthetic
TGTRGDLRAI

SEQ ID NO: 223 - protein, 10 aa, synthetic construct
  REGION 1..10: note = Synthetic
QMARGDLSTA

SEQ ID NO: 224 - protein, 10 aa, synthetic construct
  REGION 1..10: note = Synthetic
LVERGDRIMN

SEQ ID NO: 225 - protein, 10 aa, synthetic construct
  REGION 1..10: note = Synthetic
GLVRGDLNAR

SEQ ID NO: 226 - protein, 10 aa, synthetic construct
  REGION 1..10: note = Synthetic
NNPRGDLSSV

SEQ ID NO: 227 - protein, 10 aa, synthetic construct
  REGION 1..10: note = Synthetic
HEKRGDLSNS

SEQ ID NO: 228 - protein, 10 aa, synthetic construct
  REGION 1..10: note = Synthetic
SQARGDLHQT

SEQ ID NO: 229 - protein, 10 aa, synthetic construct
  REGION 1..10: note = Synthetic
FTGRGDLRTA

SEQ ID NO: 230 - protein, 10 aa, synthetic construct
  REGION 1..10: note = Synthetic
QSIRGDTGHL

SEQ ID NO: 231 - protein, 10 aa, synthetic construct
  REGION 1..10: note = Synthetic
SAGRGDMSVL

SEQ ID NO: 232 - protein, 10 aa, synthetic construct
  REGION 1..10: note = Synthetic
SERRGDEHKW

SEQ ID NO: 233 - protein, 10 aa, synthetic construct
  REGION 1..10: note = Synthetic
TTGRGDLVSL

SEQ ID NO: 234 - protein, 10 aa, synthetic construct
  REGION 1..10: note = Synthetic
LGLRGDQIGQ

SEQ ID NO: 235 - protein, 10 aa, synthetic construct
  REGION 1..10: note = Synthetic
VALRGDLTHQ

SEQ ID NO: 236 - protein, 10 aa, synthetic construct
  REGION 1..10: note = Synthetic
MIGRGDQAPL

SEQ ID NO: 237 - protein, 10 aa, synthetic construct
  REGION 1..10: note = Synthetic
FQARGDHSTL

SEQ ID NO: 238 - protein, 10 aa, synthetic construct
  REGION 1..10: note = Synthetic
NSVRGDHSSL

SEQ ID NO: 239 - protein, 10 aa, synthetic construct
  REGION 1..10: note = Synthetic
WPNRGDLQST

SEQ ID NO: 240 - protein, 10 aa, synthetic construct
  REGION 1..10: note = Synthetic
SASRGDYQTL

SEQ ID NO: 241 - protein, 10 aa, synthetic construct
  REGION 1..10: note = Synthetic
TMQRGDLHTI

SEQ ID NO: 242 - protein, 10 aa, synthetic construct
  REGION 1..10: note = Synthetic
TALRGDLAGT

SEQ ID NO: 243 - protein, 10 aa, synthetic construct
  REGION 1..10: note = Synthetic
VNARGDFSQT

SEQ ID NO: 244 - protein, 10 aa, synthetic construct
  REGION 1..10: note = Synthetic
GWIRGDRTSM

SEQ ID NO: 245 - protein, 10 aa, synthetic construct
  REGION 1..10: note = Synthetic
TFSRGDHTVL

SEQ ID NO: 246 - protein, 10 aa, synthetic construct
  REGION 1..10: note = Synthetic
SGARGDLVGV

SEQ ID NO: 247 - protein, 10 aa, synthetic construct
  REGION 1..10: note = Synthetic
NNVRGDYTSV

SEQ ID NO: 248 - protein, 10 aa, synthetic construct
  REGION 1..10: note = Synthetic
QTARGDHVVL

SEQ ID NO: 249 - protein, 10 aa, synthetic construct
  REGION 1..10: note = Synthetic
TLIRGDLTRS

SEQ ID NO: 250 - protein, 10 aa, synthetic construct
  REGION 1..10: note = Synthetic
VTTRGDRLEL

SEQ ID NO: 251 - protein, 10 aa, synthetic construct
  REGION 1..10: note = Synthetic
EASRGDLQMR

SEQ ID NO: 252 - protein, 10 aa, synthetic construct
  REGION 1..10: note = Synthetic
TYARGDLSGH

SEQ ID NO: 253 - protein, 10 aa, synthetic construct
  REGION 1..10: note = Synthetic
DSSRGDRSSV

SEQ ID NO: 254 - protein, 10 aa, synthetic construct
  REGION 1..10: note = Synthetic
SQSRGDLVPL

SEQ ID NO: 255 - protein, 10 aa, synthetic construct
  REGION 1..10: note = Synthetic
MPARGDLVQT

SEQ ID NO: 256 - protein, 10 aa, synthetic construct
  REGION 1..10: note = Synthetic
SGVRGDRLAV

SEQ ID NO: 257 - protein, 10 aa, synthetic construct
  REGION 1..10: note = Synthetic
SNERGDQHRL

SEQ ID NO: 258 - protein, 10 aa, synthetic construct
  REGION 1..10: note = Synthetic
STLRGDYAVS

SEQ ID NO: 259 - protein, 10 aa, synthetic construct
  REGION 1..10: note = Synthetic
SNARGDIMTT

SEQ ID NO: 260 - protein, 10 aa, synthetic construct
  REGION 1..10: note = Synthetic
TTGRGDQARL

SEQ ID NO: 261 - protein, 10 aa, synthetic construct
  REGION 1..10: note = Synthetic
TTLRGDHSQL

SEQ ID NO: 262 - protein, 10 aa, synthetic construct
  REGION 1..10: note = Synthetic
TNLRGDYQLT

SEQ ID NO: 263 - protein, 10 aa, synthetic construct
  REGION 1..10: note = Synthetic
STSRGDYVTH

SEQ ID NO: 264 - protein, 10 aa, synthetic construct
  REGION 1..10: note = Synthetic
SATRGDYSIL

SEQ ID NO: 265 - protein, 10 aa, synthetic construct
  REGION 1..10: note = Synthetic
QATRGDLQHT

SEQ ID NO: 266 - protein, 10 aa, synthetic construct
  REGION 1..10: note = Synthetic
HDDRGDRRML

SEQ ID NO: 267 - protein, 10 aa, synthetic construct
  REGION 1..10: note = Synthetic
SSHRGDLLAT

SEQ ID NO: 268 - protein, 10 aa, synthetic construct
  REGION 1..10: note = Synthetic
SYQRGDQHNM

SEQ ID NO: 269 - protein, 10 aa, synthetic construct
  REGION 1..10: note = Synthetic
SHQRGDYNTL

SEQ ID NO: 270 - protein, 10 aa, synthetic construct
  REGION 1..10: note = Synthetic
MDQRGDMSVV

SEQ ID NO: 271 - protein, 10 aa, synthetic construct
  REGION 1..10: note = Synthetic
QIARGDLHVP

SEQ ID NO: 272 - protein, 10 aa, synthetic construct
  REGION 1..10: note = Synthetic
TYTRGDQHMM

SEQ ID NO: 273 - protein, 10 aa, synthetic construct
  REGION 1..10: note = Synthetic
DASRGDRTSL

SEQ ID NO: 274 - protein, 10 aa, synthetic construct
  REGION 1..10: note = Synthetic
SDRRGDLHPQ

SEQ ID NO: 275 - protein, 10 aa, synthetic construct
  REGION 1..10: note = Synthetic
SATRGDHSTL

SEQ ID NO: 276 - protein, 10 aa, synthetic construct
  REGION 1..10: note = Synthetic
AYQRGDFTSV

SEQ ID NO: 277 - protein, 10 aa, synthetic construct
  REGION 1..10: note = Synthetic
TGNRGDLQSV

SEQ ID NO: 278 - protein, 10 aa, synthetic construct
  REGION 1..10: note = Synthetic
AWRRGDLENA

SEQ ID NO: 279 - protein, 10 aa, synthetic construct
  REGION 1..10: note = Synthetic
NAARGDHGLL

SEQ ID NO: 280 - protein, 10 aa, synthetic construct
  REGION 1..10: note = Synthetic
SYSRGDHQAL

SEQ ID NO: 281 - protein, 10 aa, synthetic construct
  REGION 1..10: note = Synthetic
DGVRGDRTVV

SEQ ID NO: 282 - protein, 10 aa, synthetic construct
  REGION 1..10: note = Synthetic
SSERGDKMST

SEQ ID NO: 283 - protein, 10 aa, synthetic construct
  REGION 1..10: note = Synthetic
TSMRGDYTHV

SEQ ID NO: 284 - protein, 10 aa, synthetic construct
  REGION 1..10: note = Synthetic
SGVRGDRIII

SEQ ID NO: 285 - protein, 10 aa, synthetic construct
  REGION 1..10: note = Synthetic
ENRRGDAQLL

SEQ ID NO: 286 - protein, 10 aa, synthetic construct
  REGION 1..10: note = Synthetic
TVYRGDREQH

SEQ ID NO: 287 - protein, 10 aa, synthetic construct
  REGION 1..10: note = Synthetic
LDRRGDLLNS

SEQ ID NO: 288 - protein, 10 aa, synthetic construct
  REGION 1..10: note = Synthetic
ESVRGDLRST

SEQ ID NO: 289 - protein, 10 aa, synthetic construct
  REGION 1..10: note = Synthetic
DKYRGDQRGL

SEQ ID NO: 290 - protein, 10 aa, synthetic construct
  REGION 1..10: note = Synthetic
TDRRGDAHIL

SEQ ID NO: 291 - protein, 10 aa, synthetic construct
  REGION 1..10: note = Synthetic
SQTRGDTSLM

SEQ ID NO: 292 - protein, 10 aa, synthetic construct
  REGION 1..10: note = Synthetic
DATRGDTRML

SEQ ID NO: 293 - protein, 10 aa, synthetic construct
  REGION 1..10: note = Synthetic
SMQRGDLTHA

SEQ ID NO: 294 - protein, 10 aa, synthetic construct
  REGION 1..10: note = Synthetic
SGTRGDTLIL

SEQ ID NO: 295 - protein, 10 aa, synthetic construct
  REGION 1..10: note = Synthetic
ANTRGDHQNF

SEQ ID NO: 296 - protein, 10 aa, synthetic construct
  REGION 1..10: note = Synthetic
TSQRGDHTQL

SEQ ID NO: 297 - protein, 10 aa, synthetic construct
  REGION 1..10: note = Synthetic
SHWRGDTSSL

SEQ ID NO: 298 - protein, 10 aa, synthetic construct
  REGION 1..10: note = Synthetic
ISGRGDRQEL

SEQ ID NO: 299 - protein, 10 aa, synthetic construct
  REGION 1..10: note = Synthetic
SVLRGDIGTI

SEQ ID NO: 300 - protein, 10 aa, synthetic construct
  REGION 1..10: note = Synthetic
QDSRGDLSGK

SEQ ID NO: 301 - protein, 10 aa, synthetic construct
  REGION 1..10: note = Synthetic
KPIRGDGAEL

SEQ ID NO: 302 - protein, 10 aa, synthetic construct
  REGION 1..10: note = Synthetic
TYMRGDLQHT

SEQ ID NO: 303 - protein, 10 aa, synthetic construct
  REGION 1..10: note = Synthetic
TELRGDLSST

SEQ ID NO: 304 - protein, 10 aa, synthetic construct
  REGION 1..10: note = Synthetic
SAMRGDHAVL

SEQ ID NO: 305 - protein, 10 aa, synthetic construct
  REGION 1..10: note = Synthetic
SWVRGDASTL

SEQ ID NO: 306 - protein, 10 aa, synthetic construct
  REGION 1..10: note = Synthetic
QYARGDPHAL

SEQ ID NO: 307 - protein, 10 aa, synthetic construct
  REGION 1..10: note = Synthetic
STNRGDIVVH

SEQ ID NO: 308 - protein, 10 aa, synthetic construct
  REGION 1..10: note = Synthetic
VNIRGDLHQT

SEQ ID NO: 309 - protein, 10 aa, synthetic construct
  REGION 1..10: note = Synthetic
REYRGDSSIL

SEQ ID NO: 310 - protein, 10 aa, synthetic construct
  REGION 1..10: note = Synthetic
STLRGDGSMM

SEQ ID NO: 311 - protein, 10 aa, synthetic construct
  REGION 1..10: note = Synthetic
SSQRGDITAH

SEQ ID NO: 312 - protein, 10 aa, synthetic construct
  REGION 1..10: note = Synthetic
TEFRGDRSTV

SEQ ID NO: 313 - protein, 10 aa, synthetic construct
  REGION 1..10: note = Synthetic
TSTRGDYVTV

SEQ ID NO: 314 - protein, 10 aa, synthetic construct
  REGION 1..10: note = Synthetic
NHLRGDVSAI

SEQ ID NO: 315 - protein, 10 aa, synthetic construct
  REGION 1..10: note = Synthetic
LERRGDLVST

SEQ ID NO: 316 - protein, 10 aa, synthetic construct
  REGION 1..10: note = Synthetic
NEYRGDHSHP

SEQ ID NO: 317 - protein, 10 aa, synthetic construct
  REGION 1..10: note = Synthetic
NWQRGDTSTL

SEQ ID NO: 318 - protein, 10 aa, synthetic construct
  REGION 1..10: note = Synthetic
TDSRGDRTVL

SEQ ID NO: 319 - protein, 10 aa, synthetic construct
  REGION 1..10: note = Synthetic
YAVRGDQHTI

SEQ ID NO: 320 - protein, 10 aa, synthetic construct
  REGION 1..10: note = Synthetic
FGVRGDTRDL

SEQ ID NO: 321 - protein, 10 aa, synthetic construct
  REGION 1..10: note = Synthetic
SSARGDTGML

SEQ ID NO: 322 - protein, 10 aa, synthetic construct
  REGION 1..10: note = Synthetic
SAMRGDQMGQ

SEQ ID NO: 323 - protein, 10 aa, synthetic construct
  REGION 1..10: note = Synthetic
SHTRGDLVTT

SEQ ID NO: 324 - protein, 10 aa, synthetic construct
  REGION 1..10: note = Synthetic
VTTRGDTAIL

SEQ ID NO: 325 - protein, 10 aa, synthetic construct
  REGION 1..10: note = Synthetic
EPTRGDRHSI

SEQ ID NO: 326 - protein, 10 aa, synthetic construct
  REGION 1..10: note = Synthetic
GSQRGDRLVL

SEQ ID NO: 327 - protein, 10 aa, synthetic construct
  REGION 1..10: note = Synthetic
QHYRGDLSTT

SEQ ID NO: 328 - protein, 10 aa, synthetic construct
  REGION 1..10: note = Synthetic
METRGDRQQL

SEQ ID NO: 329 - protein, 10 aa, synthetic construct
  REGION 1..10: note = Synthetic
EALRGDKVVL

SEQ ID NO: 330 - protein, 10 aa, synthetic construct
  REGION 1..10: note = Synthetic
NAVRGDQSYV

SEQ ID NO: 331 - protein, 10 aa, synthetic construct
  REGION 1..10: note = Synthetic
SPLRGDNRAL

SEQ ID NO: 332 - protein, 10 aa, synthetic construct
  REGION 1..10: note = Synthetic
ENRRGDTHAL

SEQ ID NO: 333 - protein, 10 aa, synthetic construct
  REGION 1..10: note = Synthetic
NSQRGDLTGT

SEQ ID NO: 334 - protein, 10 aa, synthetic construct
  REGION 1..10: note = Synthetic
DNSRGDHSRL

SEQ ID NO: 335 - protein, 10 aa, synthetic construct
  REGION 1..10: note = Synthetic
NTHRGDYASI

SEQ ID NO: 336 - protein, 10 aa, synthetic construct
  REGION 1..10: note = Synthetic
HTTRGDQQPL

SEQ ID NO: 337 - protein, 10 aa, synthetic construct
  REGION 1..10: note = Synthetic
EWRRGDQTAL

SEQ ID NO: 338 - protein, 10 aa, synthetic construct
  REGION 1..10: note = Synthetic
TAVRGDQTTV

SEQ ID NO: 339 - protein, 10 aa, synthetic construct
  REGION 1..10: note = Synthetic
EYLRGDRISQ

SEQ ID NO: 340 - protein, 10 aa, synthetic construct
  REGION 1..10: note = Synthetic
SRYRGDQETI

SEQ ID NO: 341 - protein, 10 aa, synthetic construct
  REGION 1..10: note = Synthetic
ASLRGDTVTL

SEQ ID NO: 342 - protein, 10 aa, synthetic construct
  REGION 1..10: note = Synthetic
VGVRGDSHVL

SEQ ID NO: 343 - protein, 10 aa, synthetic construct
  REGION 1..10: note = Synthetic
TNSRGDHTSL

SEQ ID NO: 344 - protein, 10 aa, synthetic construct
  REGION 1..10: note = Synthetic
VDQRGDQRAL

SEQ ID NO: 345 - protein, 10 aa, synthetic construct
  REGION 1..10: note = Synthetic
ASVRGDRLDV

SEQ ID NO: 346 - protein, 10 aa, synthetic construct
  REGION 1..10: note = Synthetic
TSYRGDLSSN

SEQ ID NO: 347 - protein, 10 aa, synthetic construct
  REGION 1..10: note = Synthetic
TSDRGDSSNR

SEQ ID NO: 348 - protein, 10 aa, synthetic construct
  REGION 1..10: note = Synthetic
SYMRGDLDMR

SEQ ID NO: 349 - protein, 10 aa, synthetic construct
  REGION 1..10: note = Synthetic
TDVRGDRSMI

SEQ ID NO: 350 - protein, 10 aa, synthetic construct
  REGION 1..10: note = Synthetic
SYVRGDSSTV

SEQ ID NO: 351 - protein, 10 aa, synthetic construct
  REGION 1..10: note = Synthetic
QVYRGDRESV

SEQ ID NO: 352 - protein, 10 aa, synthetic construct
  REGION 1..10: note = Synthetic
TDRRGDAVSF

SEQ ID NO: 353 - protein, 10 aa, synthetic construct
  REGION 1..10: note = Synthetic
TNSRGDLHTT

SEQ ID NO: 354 - protein, 10 aa, synthetic construct
  REGION 1..10: note = Synthetic
EAIRGDFKTL

SEQ ID NO: 355 - protein, 10 aa, synthetic construct
  REGION 1..10: note = Synthetic
TGIRGDTAGL

SEQ ID NO: 356 - protein, 10 aa, synthetic construct
  REGION 1..10: note = Synthetic
TSSRGDVQSL

SEQ ID NO: 357 - protein, 10 aa, synthetic construct
  REGION 1..10: note = Synthetic
SSRRGDTNEL

SEQ ID NO: 358 - protein, 10 aa, synthetic construct
  REGION 1..10: note = Synthetic
SNARGDHTPL

SEQ ID NO: 359 - protein, 10 aa, synthetic construct
  REGION 1..10: note = Synthetic
SELRGDRSPY

SEQ ID NO: 360 - protein, 10 aa, synthetic construct
  REGION 1..10: note = Synthetic
VHARGDTSIM

SEQ ID NO: 361 - protein, 10 aa, synthetic construct
  REGION 1..10: note = Synthetic
SALRGDHGTL

SEQ ID NO: 362 - protein, 10 aa, synthetic construct
  REGION 1..10: note = Synthetic
QTGRGDIAGM

SEQ ID NO: 363 - protein, 10 aa, synthetic construct
  REGION 1..10: note = Synthetic
TVARGDQIRL

SEQ ID NO: 364 - protein, 10 aa, synthetic construct
  REGION 1..10: note = Synthetic
TNSRGDSVAL

SEQ ID NO: 365 - protein, 10 aa, synthetic construct
  REGION 1..10: note = Synthetic
QNARGDSAVI

SEQ ID NO: 366 - protein, 10 aa, synthetic construct
  REGION 1..10: note = Synthetic
HYLRGDTTTL

SEQ ID NO: 367 - protein, 10 aa, synthetic construct
  REGION 1..10: note = Synthetic
ANARGDLQNT

SEQ ID NO: 368 - protein, 10 aa, synthetic construct
  REGION 1..10: note = Synthetic
QNIRGDIRTV

SEQ ID NO: 369 - protein, 10 aa, synthetic construct
  REGION 1..10: note = Synthetic
AALRGDHGQM

SEQ ID NO: 370 - protein, 10 aa, synthetic construct
  REGION 1..10: note = Synthetic
TTDRGDLSAR

SEQ ID NO: 371 - protein, 10 aa, synthetic construct
  REGION 1..10: note = Synthetic
LNVRGDLVHT

SEQ ID NO: 372 - protein, 10 aa, synthetic construct
  REGION 1..10: note = Synthetic
YSTRGDHTVL

SEQ ID NO: 373 - protein, 10 aa, synthetic construct
  REGION 1..10: note = Synthetic
TNARGDLTVS

SEQ ID NO: 374 - protein, 10 aa, synthetic construct
  REGION 1..10: note = Synthetic
TNARGDYTAL

SEQ ID NO: 375 - protein, 10 aa, synthetic construct
  REGION 1..10: note = Synthetic
AEGRGDTRGS

SEQ ID NO: 376 - protein, 10 aa, synthetic construct
  REGION 1..10: note = Synthetic
TNIRGDQSSV

SEQ ID NO: 377 - protein, 10 aa, synthetic construct
  REGION 1..10: note = Synthetic
VDRRGDTMTM

SEQ ID NO: 378 - protein, 10 aa, synthetic construct
  REGION 1..10: note = Synthetic
QIGRGDVTPL

SEQ ID NO: 379 - protein, 10 aa, synthetic construct
  REGION 1..10: note = Synthetic
MQARGDLLGV

SEQ ID NO: 380 - protein, 10 aa, synthetic construct
  REGION 1..10: note = Synthetic
NTQRGDYASV

SEQ ID NO: 381 - protein, 10 aa, synthetic construct
  REGION 1..10: note = Synthetic
SDTRGDRITQ

SEQ ID NO: 382 - protein, 10 aa, synthetic construct
  REGION 1..10: note = Synthetic
SAIRGDYRDV

SEQ ID NO: 383 - protein, 10 aa, synthetic construct
  REGION 1..10: note = Synthetic
VGVRGDVHPL

SEQ ID NO: 384 - protein, 10 aa, synthetic construct
  REGION 1..10: note = Synthetic
TVLRGDAERL

SEQ ID NO: 385 - protein, 10 aa, synthetic construct
  REGION 1..10: note = Synthetic
ASTRGDLSGQ

SEQ ID NO: 386 - protein, 10 aa, synthetic construct
  REGION 1..10: note = Synthetic
DSRRGDGQNL

SEQ ID NO: 387 - protein, 10 aa, synthetic construct
  REGION 1..10: note = Synthetic
IDKRGDIQGL

SEQ ID NO: 388 - protein, 10 aa, synthetic construct
  REGION 1..10: note = Synthetic
TVTRGDLLVN

SEQ ID NO: 389 - protein, 10 aa, synthetic construct
  REGION 1..10: note = Synthetic
DSTRGDRLGL

SEQ ID NO: 390 - protein, 10 aa, synthetic construct
  REGION 1..10: note = Synthetic
AANRGDYASL

SEQ ID NO: 391 - protein, 10 aa, synthetic construct
  REGION 1..10: note = Synthetic
RDYRGDTSSL

SEQ ID NO: 392 - protein, 10 aa, synthetic construct
  REGION 1..10: note = Synthetic
SNIRGDASLH

SEQ ID NO: 393 - protein, 10 aa, synthetic construct
  REGION 1..10: note = Synthetic
NLQRGDRTDF

SEQ ID NO: 394 - protein, 10 aa, synthetic construct
  REGION 1..10: note = Synthetic
NASRGDHSSM

SEQ ID NO: 395 - protein, 10 aa, synthetic construct
  REGION 1..10: note = Synthetic
TSMRGDYTHV

SEQ ID NO: 396 - protein, 10 aa, synthetic construct
  REGION 1..10: note = Synthetic
TSRRGDLNDV

SEQ ID NO: 397 - protein, 10 aa, synthetic construct
  REGION 1..10: note = Synthetic
QSHRGDVQSL

SEQ ID NO: 398 - protein, 10 aa, synthetic construct
  REGION 1..10: note = Synthetic
STTRGDYQSV

SEQ ID NO: 399 - protein, 10 aa, synthetic construct
  REGION 1..10: note = Synthetic
YSTRGDHAML

SEQ ID NO: 400 - protein, 10 aa, synthetic construct
  REGION 1..10: note = Synthetic
TSARGDLIHT

SEQ ID NO: 401 - protein, 10 aa, synthetic construct
  REGION 1..10: note = Synthetic
ATARGDRESF

SEQ ID NO: 402 - protein, 10 aa, synthetic construct
  REGION 1..10: note = Synthetic
ASTRGDYSTM

SEQ ID NO: 403 - protein, 10 aa, synthetic construct
  REGION 1..10: note = Synthetic
SNNRGDVQRL

SEQ ID NO: 404 - protein, 10 aa, synthetic construct
  REGION 1..10: note = Synthetic
ERLRGDQHII

SEQ ID NO: 405 - protein, 10 aa, synthetic construct
  REGION 1..10: note = Synthetic
SSIRGDHATL

SEQ ID NO: 406 - protein, 10 aa, synthetic construct
  REGION 1..10: note = Synthetic
NPTRGDIATV

SEQ ID NO: 407 - protein, 10 aa, synthetic construct
  REGION 1..10: note = Synthetic
MSTRGDLSVN

SEQ ID NO: 408 - protein, 10 aa, synthetic construct
  REGION 1..10: note = Synthetic
MDRRGDITYA

SEQ ID NO: 409 - protein, 10 aa, synthetic construct
  REGION 1..10: note = Synthetic
NATRGDLMSA

SEQ ID NO: 410 - protein, 10 aa, synthetic construct
  REGION 1..10: note = Synthetic
SDHRGDRTYQ

SEQ ID NO: 411 - protein, 10 aa, synthetic construct
  REGION 1..10: note = Synthetic
NWVRGDLSTA

SEQ ID NO: 412 - protein, 10 aa, synthetic construct
  REGION 1..10: note = Synthetic
SSHRGDLSAT

SEQ ID NO: 413 - protein, 10 aa, synthetic construct
  REGION 1..10: note = Synthetic
NATRGDYREI

SEQ ID NO: 414 - protein, 10 aa, synthetic construct
  REGION 1..10: note = Synthetic
DTLRGDLQTA

SEQ ID NO: 415 - protein, 10 aa, synthetic construct
  REGION 1..10: note = Synthetic
IAVRGDLTPV

SEQ ID NO: 416 - protein, 10 aa, synthetic construct
  REGION 1..10: note = Synthetic
TLLRGDLAHS

SEQ ID NO: 417 - protein, 10 aa, synthetic construct
  REGION 1..10: note = Synthetic
MNTRGDHTVL

SEQ ID NO: 418 - protein, 10 aa, synthetic construct
  REGION 1..10: note = Synthetic
TGHRGDIAVY

SEQ ID NO: 419 - protein, 10 aa, synthetic construct
  REGION 1..10: note = Synthetic
TSNRGDQMSN

SEQ ID NO: 420 - protein, 10 aa, synthetic construct
  REGION 1..10: note = Synthetic
SATRGDHTAI

SEQ ID NO: 421 - protein, 10 aa, synthetic construct
  REGION 1..10: note = Synthetic
SSVRGDREHA

SEQ ID NO: 422 - protein, 10 aa, synthetic construct
  REGION 1..10: note = Synthetic
TNSRGDLVVH

SEQ ID NO: 423 - protein, 10 aa, synthetic construct
  REGION 1..10: note = Synthetic
ETRRGDLSSQ

SEQ ID NO: 424 - protein, 10 aa, synthetic construct
  REGION 1..10: note = Synthetic
TYARGDITLT

SEQ ID NO: 425 - protein, 10 aa, synthetic construct
  REGION 1..10: note = Synthetic
SASRGDTLHL

SEQ ID NO: 426 - protein, 10 aa, synthetic construct
  REGION 1..10: note = Synthetic
DNQRGDLSSR

SEQ ID NO: 427 - protein, 10 aa, synthetic construct
  REGION 1..10: note = Synthetic
TQSRGDLRDA

SEQ ID NO: 428 - protein, 10 aa, synthetic construct
  REGION 1..10: note = Synthetic
ENRRGDLTNA

SEQ ID NO: 429 - protein, 10 aa, synthetic construct
  REGION 1..10: note = Synthetic
TSIRGDISSV

SEQ ID NO: 430 - protein, 10 aa, synthetic construct
  REGION 1..10: note = Synthetic
ISARGDTMTL

SEQ ID NO: 431 - protein, 10 aa, synthetic construct
  REGION 1..10: note = Synthetic
SRVRGDQDHW

SEQ ID NO: 432 - protein, 10 aa, synthetic construct
  REGION 1..10: note = Synthetic
SGNRGDIASY

SEQ ID NO: 433 - protein, 10 aa, synthetic construct
  REGION 1..10: note = Synthetic
NEQRGDRYNH

SEQ ID NO: 434 - protein, 10 aa, synthetic construct
  REGION 1..10: note = Synthetic
EALRGDVRAL

SEQ ID NO: 435 - protein, 10 aa, synthetic construct
  REGION 1..10: note = Synthetic
VDRRGDYTQM

SEQ ID NO: 436 - protein, 10 aa, synthetic construct
  REGION 1..10: note = Synthetic
NNVRGDYTSV

SEQ ID NO: 437 - protein, 10 aa, synthetic construct
  REGION 1..10: note = Synthetic
QTYRGDASVL

SEQ ID NO: 438 - protein, 10 aa, synthetic construct
  REGION 1..10: note = Synthetic
SNYRGDHGSL

SEQ ID NO: 439 - protein, 10 aa, synthetic construct
  REGION 1..10: note = Synthetic
TSSRGDLREV

SEQ ID NO: 440 - protein, 10 aa, synthetic construct
  REGION 1..10: note = Synthetic
QYTRGDVSNL

SEQ ID NO: 441 - protein, 10 aa, synthetic construct
  REGION 1..10: note = Synthetic
SDLRGDVRER

SEQ ID NO: 442 - protein, 10 aa, synthetic construct
  REGION 1..10: note = Synthetic
QNARGDTTAL

SEQ ID NO: 443 - protein, 10 aa, synthetic construct
  REGION 1..10: note = Synthetic
NSLRGDRDTM

SEQ ID NO: 444 - protein, 10 aa, synthetic construct
  REGION 1..10: note = Synthetic
SNSRGDQAQV

SEQ ID NO: 445 - protein, 10 aa, synthetic construct
  REGION 1..10: note = Synthetic
EATRGDRSTL

SEQ ID NO: 446 - protein, 10 aa, synthetic construct
  REGION 1..10: note = Synthetic
VPQRGDITNL

SEQ ID NO: 447 - protein, 10 aa, synthetic construct
  REGION 1..10: note = Synthetic
DKIRGDLRSI

SEQ ID NO: 448 - protein, 10 aa, synthetic construct
  REGION 1..10: note = Synthetic
SAARGDYSIV

SEQ ID NO: 449 - protein, 10 aa, synthetic construct
  REGION 1..10: note = Synthetic
VGLRGDLIGQ

SEQ ID NO: 450 - protein, 10 aa, synthetic construct
  REGION 1..10: note = Synthetic
QAGRGDLTVI

SEQ ID NO: 451 - protein, 10 aa, synthetic construct
  REGION 1..10: note = Synthetic
SKTRGDFQEA

SEQ ID NO: 452 - protein, 10 aa, synthetic construct
  REGION 1..10: note = Synthetic
GTARGDYSML

SEQ ID NO: 453 - protein, 10 aa, synthetic construct
  REGION 1..10: note = Synthetic
ISTRGDLVTI

SEQ ID NO: 454 - protein, 10 aa, synthetic construct
  REGION 1..10: note = Synthetic
TGTRGDREYM

SEQ ID NO: 455 - protein, 10 aa, synthetic construct
  REGION 1..10: note = Synthetic
MTTRGDLSIT

SEQ ID NO: 456 - protein, 10 aa, synthetic construct
  REGION 1..10: note = Synthetic
STSRGDMTSV

SEQ ID NO: 457 - protein, 10 aa, synthetic construct
  REGION 1..10: note = Synthetic
GPARGDFTSS

SEQ ID NO: 458 - protein, 10 aa, synthetic construct
  REGION 1..10: note = Synthetic
VDRRGDLGHV

SEQ ID NO: 459 - protein, 10 aa, synthetic construct
  REGION 1..10: note = Synthetic
NSGRGDMSQL

SEQ ID NO: 460 - protein, 10 aa, synthetic construct
  REGION 1..10: note = Synthetic
SQGRGDLERY

SEQ ID NO: 461 - protein, 10 aa, synthetic construct
  REGION 1..10: note = Synthetic
VFGRGDQYTL

SEQ ID NO: 462 - protein, 10 aa, synthetic construct
  REGION 1..10: note = Synthetic
IVGRGDLHLQ

SEQ ID NO: 463 - protein, 10 aa, synthetic construct
  REGION 1..10: note = Synthetic
SYSRGDTSRL

SEQ ID NO: 464 - protein, 10 aa, synthetic construct
  REGION 1..10: note = Synthetic
MSSRGDRATI

SEQ ID NO: 465 - protein, 10 aa, synthetic construct
  REGION 1..10: note = Synthetic
MSSRGDLTRV

SEQ ID NO: 466 - protein, 10 aa, synthetic construct
  REGION 1..10: note = Synthetic
QHTRGDFGNL

SEQ ID NO: 467 - protein, 10 aa, synthetic construct
  REGION 1..10: note = Synthetic
ETRRGDLSSQ

SEQ ID NO: 468 - protein, 10 aa, synthetic construct
  REGION 1..10: note = Synthetic
TGTRGDLRAI

SEQ ID NO: 469 - protein, 10 aa, synthetic construct
  REGION 1..10: note = Synthetic
QMARGDLSTA

SEQ ID NO: 470 - protein, 10 aa, synthetic construct
  REGION 1..10: note = Synthetic
LVERGDRIMN

SEQ ID NO: 471 - protein, 10 aa, synthetic construct
  REGION 1..10: note = Synthetic
GLVRGDLNAR

SEQ ID NO: 472 - protein, 10 aa, synthetic construct
  REGION 1..10: note = Synthetic
NNPRGDLSSV

SEQ ID NO: 473 - protein, 10 aa, synthetic construct
  REGION 1..10: note = Synthetic
HEKRGDLSNS

SEQ ID NO: 474 - protein, 10 aa, synthetic construct
  REGION 1..10: note = Synthetic
SQARGDLHQT

SEQ ID NO: 475 - protein, 10 aa, synthetic construct
  REGION 1..10: note = Synthetic
FTGRGDLRTA

SEQ ID NO: 476 - protein, 10 aa, synthetic construct
  REGION 1..10: note = Synthetic
QSIRGDTGHL

SEQ ID NO: 477 - protein, 10 aa, synthetic construct
  REGION 1..10: note = Synthetic
SAGRGDMSVL

SEQ ID NO: 478 - protein, 10 aa, synthetic construct
  REGION 1..10: note = Synthetic
SERRGDEHKW

SEQ ID NO: 479 - protein, 10 aa, synthetic construct
  REGION 1..10: note = Synthetic
TTGRGDLVSL

SEQ ID NO: 480 - protein, 10 aa, synthetic construct
  REGION 1..10: note = Synthetic
LGLRGDQIGQ

SEQ ID NO: 481 - protein, 10 aa, synthetic construct
  REGION 1..10: note = Synthetic
VALRGDLTHQ

SEQ ID NO: 482 - protein, 10 aa, synthetic construct
  REGION 1..10: note = Synthetic
MIGRGDQAPL

SEQ ID NO: 483 - protein, 10 aa, synthetic construct
  REGION 1..10: note = Synthetic
FQARGDHSTL

SEQ ID NO: 484 - protein, 10 aa, synthetic construct
  REGION 1..10: note = Synthetic
NSVRGDHSSL

SEQ ID NO: 485 - protein, 10 aa, synthetic construct
  REGION 1..10: note = Synthetic
WPNRGDLQST

SEQ ID NO: 486 - protein, 10 aa, synthetic construct
  REGION 1..10: note = Synthetic
SASRGDYQTL

SEQ ID NO: 487 - protein, 10 aa, synthetic construct
  REGION 1..10: note = Synthetic
TMQRGDLHTI

SEQ ID NO: 488 - protein, 10 aa, synthetic construct
  REGION 1..10: note = Synthetic
TALRGDLAGT

SEQ ID NO: 489 - protein, 10 aa, synthetic construct
  REGION 1..10: note = Synthetic
VNARGDFSQT

SEQ ID NO: 490 - protein, 10 aa, synthetic construct
  REGION 1..10: note = Synthetic
GWIRGDRTSM

SEQ ID NO: 491 - protein, 10 aa, synthetic construct
  REGION 1..10: note = Synthetic
TFSRGDHTVL

SEQ ID NO: 492 - protein, 10 aa, synthetic construct
  REGION 1..10: note = Synthetic
SGARGDLVGV

SEQ ID NO: 493 - protein, 10 aa, synthetic construct
  REGION 1..10: note = Synthetic
NNVRGDYTSV

SEQ ID NO: 494 - protein, 10 aa, synthetic construct
  REGION 1..10: note = Synthetic
QTARGDHVVL

SEQ ID NO: 495 - protein, 10 aa, synthetic construct
  REGION 1..10: note = Synthetic
TLIRGDLTRS

SEQ ID NO: 496 - protein, 10 aa, synthetic construct
  REGION 1..10: note = Synthetic
VTTRGDRLEL

SEQ ID NO: 497 - protein, 10 aa, synthetic construct
  REGION 1..10: note = Synthetic
EARRGDLQSP

SEQ ID NO: 498 - protein, 10 aa, synthetic construct
  REGION 1..10: note = Synthetic
SSSRGDRLEL

SEQ ID NO: 499 - protein, 10 aa, synthetic construct
  REGION 1..10: note = Synthetic
SSLRGDKDHL

SEQ ID NO: 500 - protein, 10 aa, synthetic construct
  REGION 1..10: note = Synthetic
ESLRGDVGAR

SEQ ID NO: 501 - protein, 10 aa, synthetic construct
  REGION 1..10: note = Synthetic
TSSRGDVQSL

SEQ ID NO: 502 - protein, 10 aa, synthetic construct
  REGION 1..10: note = Synthetic
LQSRGDVERQ

SEQ ID NO: 503 - protein, 10 aa, synthetic construct
  REGION 1..10: note = Synthetic
IDRRGDGHSL

SEQ ID NO: 504 - protein, 10 aa, synthetic construct
  REGION 1..10: note = Synthetic
QATRGDHAVV

SEQ ID NO: 505 - protein, 10 aa, synthetic construct
  REGION 1..10: note = Synthetic
QQTRGDLLPT

SEQ ID NO: 506 - protein, 10 aa, synthetic construct
  REGION 1..10: note = Synthetic
INVRGDYSST

SEQ ID NO: 507 - protein, 10 aa, synthetic construct
  REGION 1..10: note = Synthetic
YAYRGDTHNL

SEQ ID NO: 508 - protein, 10 aa, synthetic construct
  REGION 1..10: note = Synthetic
KPTRGDTATT

SEQ ID NO: 509 - protein, 10 aa, synthetic construct
  REGION 1..10: note = Synthetic
NERRGDHLGL

SEQ ID NO: 510 - protein, 10 aa, synthetic construct
  REGION 1..10: note = Synthetic
DRGRGDSTQG

SEQ ID NO: 511 - protein, 10 aa, synthetic construct
  REGION 1..10: note = Synthetic
MPARGDLVQT

SEQ ID NO: 512 - protein, 10 aa, synthetic construct
  REGION 1..10: note = Synthetic
QASRGDLQAS

SEQ ID NO: 513 - protein, 10 aa, synthetic construct
  REGION 1..10: note = Synthetic
LALRGDGALT

SEQ ID NO: 514 - protein, 10 aa, synthetic construct
  REGION 1..10: note = Synthetic
MERRGDQTQV

SEQ ID NO: 515 - protein, 10 aa, synthetic construct
  REGION 1..10: note = Synthetic
ITLRGDRDFP

SEQ ID NO: 516 - protein, 10 aa, synthetic construct
  REGION 1..10: note = Synthetic
TAARGDYIGM

SEQ ID NO: 517 - protein, 10 aa, synthetic construct
  REGION 1..10: note = Synthetic
EARRGDGVNV

SEQ ID NO: 518 - protein, 10 aa, synthetic construct
  REGION 1..10: note = Synthetic
SSGRGDTAGV

SEQ ID NO: 519 - protein, 10 aa, synthetic construct
  REGION 1..10: note = Synthetic
AISRGDTESV

SEQ ID NO: 520 - protein, 10 aa, synthetic construct
  REGION 1..10: note = Synthetic
MLIRGDHSAA

SEQ ID NO: 521 - protein, 10 aa, synthetic construct
  REGION 1..10: note = Synthetic
MKGRGDITDP

SEQ ID NO: 522 - protein, 10 aa, synthetic construct
  REGION 1..10: note = Synthetic
RNVRGDSDTT

SEQ ID NO: 523 - protein, 10 aa, synthetic construct
  REGION 1..10: note = Synthetic
LPYRGDTAYA

SEQ ID NO: 524 - protein, 10 aa, synthetic construct
  REGION 1..10: note = Synthetic
SNSRGDAQSK

SEQ ID NO: 525 - protein, 10 aa, synthetic construct
  REGION 1..10: note = Synthetic
TNQRGDRTEM

SEQ ID NO: 526 - protein, 10 aa, synthetic construct
  REGION 1..10: note = Synthetic
TEKRGDISGT

SEQ ID NO: 527 - protein, 10 aa, synthetic construct
  REGION 1..10: note = Synthetic
GSYRGDERQL

SEQ ID NO: 528 - protein, 10 aa, synthetic construct
  REGION 1..10: note = Synthetic
AGFRGDANAL

SEQ ID NO: 529 - protein, 10 aa, synthetic construct
  REGION 1..10: note = Synthetic
QYRRGDASLI

SEQ ID NO: 530 - protein, 10 aa, synthetic construct
  REGION 1..10: note = Synthetic
MLGRGDTLAL

SEQ ID NO: 531 - protein, 10 aa, synthetic construct
  REGION 1..10: note = Synthetic
VINRGDTTYS

SEQ ID NO: 532 - protein, 10 aa, synthetic construct
  REGION 1..10: note = Synthetic
EQLRGDLSNR

SEQ ID NO: 533 - protein, 10 aa, synthetic construct
  REGION 1..10: note = Synthetic
SHQRGDNPLY

SEQ ID NO: 534 - protein, 10 aa, synthetic construct
  REGION 1..10: note = Synthetic
SSIRGDMVRI

SEQ ID NO: 535 - protein, 10 aa, synthetic construct
  REGION 1..10: note = Synthetic
VHVRGDMATT

SEQ ID NO: 536 - protein, 10 aa, synthetic construct
  REGION 1..10: note = Synthetic
KDRRGDQTEY

SEQ ID NO: 537 - protein, 10 aa, synthetic construct
  REGION 1..10: note = Synthetic
TKQRGDTENY

SEQ ID NO: 538 - protein, 10 aa, synthetic construct
  REGION 1..10: note = Synthetic
SGERGDSMGL

SEQ ID NO: 539 - protein, 10 aa, synthetic construct
  REGION 1..10: note = Synthetic
TLARGDPKDA

SEQ ID NO: 540 - protein, 10 aa, synthetic construct
  REGION 1..10: note = Synthetic
MSVRGDLSTS

SEQ ID NO: 541 - protein, 10 aa, synthetic construct
  REGION 1..10: note = Synthetic
GYQRGDAMKL

SEQ ID NO: 542 - protein, 10 aa, synthetic construct
  REGION 1..10: note = Synthetic
DSSRGDRLSV

SEQ ID NO: 543 - protein, 10 aa, synthetic construct
  REGION 1..10: note = Synthetic
VNKRGDANEL

SEQ ID NO: 544 - protein, 10 aa, synthetic construct
  REGION 1..10: note = Synthetic
NERRGDSLYM

SEQ ID NO: 545 - protein, 10 aa, synthetic construct
  REGION 1..10: note = Synthetic
CAARGDLTNS

SEQ ID NO: 546 - protein, 10 aa, synthetic construct
  REGION 1..10: note = Synthetic
TTSRGDQYEK

SEQ ID NO: 547 - protein, 10 aa, synthetic construct
  REGION 1..10: note = Synthetic
ERTRGDIATQ

SEQ ID NO: 548 - protein, 10 aa, synthetic construct
  REGION 1..10: note = Synthetic
AAMRGDLSTT

SEQ ID NO: 549 - protein, 10 aa, synthetic construct
  REGION 1..10: note = Synthetic
TALRGDYAST

SEQ ID NO: 550 - protein, 10 aa, synthetic construct
  REGION 1..10: note = Synthetic
ASTRGDMSSS

SEQ ID NO: 551 - protein, 10 aa, synthetic construct
  REGION 1..10: note = Synthetic
AVGRGDSLRL

SEQ ID NO: 552 - protein, 10 aa, synthetic construct
  REGION 1..10: note = Synthetic
TRERGDTGHP

SEQ ID NO: 553 - protein, 10 aa, synthetic construct
  REGION 1..10: note = Synthetic
KYSRGDLSGE

SEQ ID NO: 554 - protein, 10 aa, synthetic construct
  REGION 1..10: note = Synthetic
SEVRGDILRS

SEQ ID NO: 555 - protein, 10 aa, synthetic construct
  REGION 1..10: note = Synthetic
MNKRGDHETQ

SEQ ID NO: 556 - protein, 10 aa, synthetic construct
  REGION 1..10: note = Synthetic
ASSRGDYDRV

SEQ ID NO: 557 - protein, 10 aa, synthetic construct
  REGION 1..10: note = Synthetic
SQLRGDNASS

SEQ ID NO: 558 - protein, 10 aa, synthetic construct
  REGION 1..10: note = Synthetic
NATRGDSGVT

SEQ ID NO: 559 - protein, 10 aa, synthetic construct
  REGION 1..10: note = Synthetic
STTRGDRMET

SEQ ID NO: 560 - protein, 10 aa, synthetic construct
  REGION 1..10: note = Synthetic
ASSRGDTSYL

SEQ ID NO: 561 - protein, 10 aa, synthetic construct
  REGION 1..10: note = Synthetic
DRTRGDLQSS

SEQ ID NO: 562 - protein, 10 aa, synthetic construct
  REGION 1..10: note = Synthetic
SNTRGDVVVT

SEQ ID NO: 563 - protein, 10 aa, synthetic construct
  REGION 1..10: note = Synthetic
ENARGDRTAM

SEQ ID NO: 564 - protein, 10 aa, synthetic construct
  REGION 1..10: note = Synthetic
NTNRGDATLH

SEQ ID NO: 565 - protein, 10 aa, synthetic construct
  REGION 1..10: note = Synthetic
HPGRGDSPTS

SEQ ID NO: 566 - protein, 10 aa, synthetic construct
  REGION 1..10: note = Synthetic
TSHRGDTLTT

SEQ ID NO: 567 - protein, 10 aa, synthetic construct
  REGION 1..10: note = Synthetic
KAPRGDNLPT

SEQ ID NO: 568 - protein, 10 aa, synthetic construct
  REGION 1..10: note = Synthetic
NMVRGDRDVL

SEQ ID NO: 569 - protein, 10 aa, synthetic construct
  REGION 1..10: note = Synthetic
GTSRGDFANV

SEQ ID NO: 570 - protein, 10 aa, synthetic construct
  REGION 1..10: note = Synthetic
ENKRGDVQQM

SEQ ID NO: 571 - protein, 10 aa, synthetic construct
  REGION 1..10: note = Synthetic
TANRGDTSSL

SEQ ID NO: 572 - protein, 10 aa, synthetic construct
  REGION 1..10: note = Synthetic
QSYRGDMSAS

SEQ ID NO: 573 - protein, 10 aa, synthetic construct
  REGION 1..10: note = Synthetic
NSARGDRLEL

SEQ ID NO: 574 - protein, 10 aa, synthetic construct
  REGION 1..10: note = Synthetic
TSNRGDRETF

SEQ ID NO: 575 - protein, 10 aa, synthetic construct
  REGION 1..10: note = Synthetic
SGVRGDVSVH

SEQ ID NO: 576 - protein, 10 aa, synthetic construct
  REGION 1..10: note = Synthetic
VTSRGDTASL

SEQ ID NO: 577 - protein, 10 aa, synthetic construct
  REGION 1..10: note = Synthetic
TGARGDTTVV

SEQ ID NO: 578 - protein, 10 aa, synthetic construct
  REGION 1..10: note = Synthetic
LVLRGDVRVM

SEQ ID NO: 579 - protein, 10 aa, synthetic construct
  REGION 1..10: note = Synthetic
SSARGDISGI

SEQ ID NO: 580 - protein, 10 aa, synthetic construct
  REGION 1..10: note = Synthetic
SNGRGDLHGS

SEQ ID NO: 581 - protein, 10 aa, synthetic construct
  REGION 1..10: note = Synthetic
VTGRGDTQYL

SEQ ID NO: 582 - protein, 10 aa, synthetic construct
  REGION 1..10: note = Synthetic
VVNRGDRTFN

SEQ ID NO: 583 - protein, 10 aa, synthetic construct
  REGION 1..10: note = Synthetic
LDKRGDPQWQ

SEQ ID NO: 584 - protein, 10 aa, synthetic construct
  REGION 1..10: note = Synthetic
QYRRGDYELS

SEQ ID NO: 585 - protein, 10 aa, synthetic construct
  REGION 1..10: note = Synthetic
VLPRGDQIIA

SEQ ID NO: 586 - protein, 10 aa, synthetic construct
  REGION 1..10: note = Synthetic
TSTRGDAAIV

SEQ ID NO: 587 - protein, 10 aa, synthetic construct
  REGION 1..10: note = Synthetic
TVFRGDRGND

SEQ ID NO: 588 - protein, 10 aa, synthetic construct
  REGION 1..10: note = Synthetic
SDSRGDTRGL

SEQ ID NO: 589 - protein, 10 aa, synthetic construct
  REGION 1..10: note = Synthetic
KDRRGDQTEY

SEQ ID NO: 590 - protein, 10 aa, synthetic construct
  REGION 1..10: note = Synthetic
TQLRGDLHPQ

SEQ ID NO: 591 - protein, 10 aa, synthetic construct
  REGION 1..10: note = Synthetic
MNGRGDASHI

SEQ ID NO: 592 - protein, 10 aa, synthetic construct
  REGION 1..10: note = Synthetic
WQSRGDRTIS

SEQ ID NO: 593 - protein, 10 aa, synthetic construct
  REGION 1..10: note = Synthetic
QDSRGDLSGK

SEQ ID NO: 594 - protein, 10 aa, synthetic construct
  REGION 1..10: note = Synthetic
SSARGDRADA

SEQ ID NO: 595 - protein, 10 aa, synthetic construct
  REGION 1..10: note = Synthetic
SSTRGDLTVN

SEQ ID NO: 596 - protein, 10 aa, synthetic construct
  REGION 1..10: note = Synthetic
ISPRGDSGGI

SEQ ID NO: 597 - protein, 10 aa, synthetic construct
  REGION 1..10: note = Synthetic
ANLRGDLHTP

SEQ ID NO: 598 - protein, 10 aa, synthetic construct
  REGION 1..10: note = Synthetic
TSSRGDLHFT

SEQ ID NO: 599 - protein, 10 aa, synthetic construct
  REGION 1..10: note = Synthetic
AATRGDTQTH

SEQ ID NO: 600 - protein, 10 aa, synthetic construct
  REGION 1..10: note = Synthetic
RDARGDLANS

SEQ ID NO: 601 - protein, 10 aa, synthetic construct
  REGION 1..10: note = Synthetic
YPHRGDQIMV

SEQ ID NO: 602 - protein, 10 aa, synthetic construct
  REGION 1..10: note = Synthetic
AGQRGDNWAQ

SEQ ID NO: 603 - protein, 10 aa, synthetic construct
  REGION 1..10: note = Synthetic
SARRGDQLEM

SEQ ID NO: 604 - protein, 10 aa, synthetic construct
  REGION 1..10: note = Synthetic
STGRGDQKLL

SEQ ID NO: 605 - protein, 10 aa, synthetic construct
  REGION 1..10: note = Synthetic
SLGRGDVSMV

SEQ ID NO: 606 - protein, 10 aa, synthetic construct
  REGION 1..10: note = Synthetic
ANERGDVSVL

SEQ ID NO: 607 - protein, 10 aa, synthetic construct
  REGION 1..10: note = Synthetic
SSIRGDLKLA

SEQ ID NO: 608 - protein, 10 aa, synthetic construct
  REGION 1..10: note = Synthetic
YSLRGDQHSS

SEQ ID NO: 609 - protein, 10 aa, synthetic construct
  REGION 1..10: note = Synthetic
STVRGDRAIT

SEQ ID NO: 610 - protein, 10 aa, synthetic construct
  REGION 1..10: note = Synthetic
HNSRGDPLGQ

SEQ ID NO: 611 - protein, 10 aa, synthetic construct
  REGION 1..10: note = Synthetic
RETRGDSSSF

SEQ ID NO: 612 - protein, 10 aa, synthetic construct
  REGION 1..10: note = Synthetic
VDKRGDLVLA

SEQ ID NO: 613 - protein, 10 aa, synthetic construct
  REGION 1..10: note = Synthetic
CNSRGDTQFL

SEQ ID NO: 614 - protein, 10 aa, synthetic construct
  REGION 1..10: note = Synthetic
TTARGDASQT

SEQ ID NO: 615 - protein, 10 aa, synthetic construct
  REGION 1..10: note = Synthetic
KMDRGDMAVS

SEQ ID NO: 616 - protein, 10 aa, synthetic construct
  REGION 1..10: note = Synthetic
KPTRGDTEHL

SEQ ID NO: 617 - protein, 10 aa, synthetic construct
  REGION 1..10: note = Synthetic
QYARGDPHAL

SEQ ID NO: 618 - protein, 10 aa, synthetic construct
  REGION 1..10: note = Synthetic
SSARGDTVAF

SEQ ID NO: 619 - protein, 10 aa, synthetic construct
  REGION 1..10: note = Synthetic
SERRGDLAPN

SEQ ID NO: 620 - protein, 10 aa, synthetic construct
  REGION 1..10: note = Synthetic
KFLRGDAGSS

SEQ ID NO: 621 - protein, 10 aa, synthetic construct
  REGION 1..10: note = Synthetic
QFNRGDQQRL

SEQ ID NO: 622 - protein, 10 aa, synthetic construct
  REGION 1..10: note = Synthetic
KFVRGDTLLP

SEQ ID NO: 623 - protein, 10 aa, synthetic construct
  REGION 1..10: note = Synthetic
EQRRGDHSAL

SEQ ID NO: 624 - protein, 10 aa, synthetic construct
  REGION 1..10: note = Synthetic
ADLRGDLRQS

SEQ ID NO: 625 - protein, 10 aa, synthetic construct
  REGION 1..10: note = Synthetic
SRVRGDRLED

SEQ ID NO: 626 - protein, 10 aa, synthetic construct
  REGION 1..10: note = Synthetic
SMTRGDTLRL

SEQ ID NO: 627 - protein, 10 aa, synthetic construct
  REGION 1..10: note = Synthetic
MSNRGDLREI

SEQ ID NO: 628 - protein, 10 aa, synthetic construct
  REGION 1..10: note = Synthetic
MLHRGDRMAV

SEQ ID NO: 629 - protein, 10 aa, synthetic construct
  REGION 1..10: note = Synthetic
NLQRGDRIPL

SEQ ID NO: 630 - protein, 10 aa, synthetic construct
  REGION 1..10: note = Synthetic
SSTRGDRLIS

SEQ ID NO: 631 - protein, 10 aa, synthetic construct
  REGION 1..10: note = Synthetic
EERRGDTHRL

SEQ ID NO: 632 - protein, 10 aa, synthetic construct
  REGION 1..10: note = Synthetic
MDKRGDQTIH

SEQ ID NO: 633 - protein, 10 aa, synthetic construct
  REGION 1..10: note = Synthetic
STKRGDLLSG

SEQ ID NO: 634 - protein, 10 aa, synthetic construct
  REGION 1..10: note = Synthetic
LIDRGDRMER

SEQ ID NO: 635 - protein, 10 aa, synthetic construct
  REGION 1..10: note = Synthetic
GRVRGDIVVV

SEQ ID NO: 636 - protein, 10 aa, synthetic construct
  REGION 1..10: note = Synthetic
DKLRGDLRLQ

SEQ ID NO: 637 - protein, 10 aa, synthetic construct
  REGION 1..10: note = Synthetic
NPTRGDNIGY

SEQ ID NO: 638 - protein, 10 aa, synthetic construct
  REGION 1..10: note = Synthetic
ELRRGDSANT

SEQ ID NO: 639 - protein, 10 aa, synthetic construct
  REGION 1..10: note = Synthetic
TAHRGDTSSI

SEQ ID NO: 640 - protein, 10 aa, synthetic construct
  REGION 1..10: note = Synthetic
HSTRGDRHLD

SEQ ID NO: 641 - protein, 10 aa, synthetic construct
  REGION 1..10: note = Synthetic
SATRGDLLST

SEQ ID NO: 642 - protein, 10 aa, synthetic construct
  REGION 1..10: note = Synthetic
TSSRGDSHAL

SEQ ID NO: 643 - protein, 10 aa, synthetic construct
  REGION 1..10: note = Synthetic
DANRGDLRDK

SEQ ID NO: 644 - protein, 10 aa, synthetic construct
  REGION 1..10: note = Synthetic
IDRRGDVRDM

SEQ ID NO: 645 - protein, 10 aa, synthetic construct
  REGION 1..10: note = Synthetic
TGTRGDLSTT

SEQ ID NO: 646 - protein, 10 aa, synthetic construct
  REGION 1..10: note = Synthetic
SNSRGDVALV

SEQ ID NO: 647 - protein, 10 aa, synthetic construct
  REGION 1..10: note = Synthetic
SYTRGDQHGL

SEQ ID NO: 648 - protein, 10 aa, synthetic construct
  REGION 1..10: note = Synthetic
EARRGDLQSP

SEQ ID NO: 649 - protein, 10 aa, synthetic construct
  REGION 1..10: note = Synthetic
SSSRGDRLEL

SEQ ID NO: 650 - protein, 10 aa, synthetic construct
  REGION 1..10: note = Synthetic
SSLRGDKDHL

SEQ ID NO: 651 - protein, 10 aa, synthetic construct
  REGION 1..10: note = Synthetic
ESLRGDVGAR

SEQ ID NO: 652 - protein, 10 aa, synthetic construct
  REGION 1..10: note = Synthetic
TSSRGDVQSL

SEQ ID NO: 653 - protein, 10 aa, synthetic construct
  REGION 1..10: note = Synthetic
LQSRGDVERQ

SEQ ID NO: 654 - protein, 10 aa, synthetic construct
  REGION 1..10: note = Synthetic
IDRRGDGHSL

SEQ ID NO: 655 - protein, 10 aa, synthetic construct
  REGION 1..10: note = Synthetic
QATRGDHAVV

SEQ ID NO: 656 - protein, 10 aa, synthetic construct
  REGION 1..10: note = Synthetic
QQTRGDLLPT

SEQ ID NO: 657 - protein, 10 aa, synthetic construct
  REGION 1..10: note = Synthetic
INVRGDYSST

SEQ ID NO: 658 - protein, 10 aa, synthetic construct
  REGION 1..10: note = Synthetic
YAYRGDTHNL

SEQ ID NO: 659 - protein, 10 aa, synthetic construct
  REGION 1..10: note = Synthetic
KPTRGDTATT

SEQ ID NO: 660 - protein, 10 aa, synthetic construct
  REGION 1..10: note = Synthetic
NERRGDHLGL

SEQ ID NO: 661 - protein, 10 aa, synthetic construct
  REGION 1..10: note = Synthetic
DRGRGDSTQG

SEQ ID NO: 662 - protein, 10 aa, synthetic construct
  REGION 1..10: note = Synthetic
MPARGDLVQT

SEQ ID NO: 663 - protein, 10 aa, synthetic construct
  REGION 1..10: note = Synthetic
QASRGDLQAS

SEQ ID NO: 664 - protein, 10 aa, synthetic construct
  REGION 1..10: note = Synthetic
LALRGDGALT

SEQ ID NO: 665 - protein, 10 aa, synthetic construct
  REGION 1..10: note = Synthetic
MERRGDQTQV

SEQ ID NO: 666 - protein, 10 aa, synthetic construct
  REGION 1..10: note = Synthetic
ITLRGDRDFP

SEQ ID NO: 667 - protein, 10 aa, synthetic construct
  REGION 1..10: note = Synthetic
TAARGDYIGM

SEQ ID NO: 668 - protein, 10 aa, synthetic construct
  REGION 1..10: note = Synthetic
EARRGDGVNV

SEQ ID NO: 669 - protein, 10 aa, synthetic construct
  REGION 1..10: note = Synthetic
SSGRGDTAGV

SEQ ID NO: 670 - protein, 10 aa, synthetic construct
  REGION 1..10: note = Synthetic
AISRGDTESV

SEQ ID NO: 671 - protein, 10 aa, synthetic construct
  REGION 1..10: note = Synthetic
MLIRGDHSAA

SEQ ID NO: 672 - protein, 10 aa, synthetic construct
  REGION 1..10: note = Synthetic
MKGRGDITDP

SEQ ID NO: 673 - protein, 10 aa, synthetic construct
  REGION 1..10: note = Synthetic
RNVRGDSDTT

SEQ ID NO: 674 - protein, 10 aa, synthetic construct
  REGION 1..10: note = Synthetic
LPYRGDTAYA

SEQ ID NO: 675 - protein, 10 aa, synthetic construct
  REGION 1..10: note = Synthetic
SNSRGDAQSK

SEQ ID NO: 676 - protein, 10 aa, synthetic construct
  REGION 1..10: note = Synthetic
TNQRGDRTEM

SEQ ID NO: 677 - protein, 10 aa, synthetic construct
  REGION 1..10: note = Synthetic
TEKRGDISGT

SEQ ID NO: 678 - protein, 10 aa, synthetic construct
  REGION 1..10: note = Synthetic
GSYRGDERQL

SEQ ID NO: 679 - protein, 10 aa, synthetic construct
  REGION 1..10: note = Synthetic
AGFRGDANAL

SEQ ID NO: 680 - protein, 10 aa, synthetic construct
  REGION 1..10: note = Synthetic
QYRRGDASLI

SEQ ID NO: 681 - protein, 10 aa, synthetic construct
  REGION 1..10: note = Synthetic
MLGRGDTLAL

SEQ ID NO: 682 - protein, 10 aa, synthetic construct
  REGION 1..10: note = Synthetic
VINRGDTTYS

SEQ ID NO: 683 - protein, 10 aa, synthetic construct
  REGION 1..10: note = Synthetic
EQLRGDLSNR

SEQ ID NO: 684 - protein, 10 aa, synthetic construct
  REGION 1..10: note = Synthetic
SHQRGDNPLY

SEQ ID NO: 685 - protein, 10 aa, synthetic construct
  REGION 1..10: note = Synthetic
SSIRGDMVRI

SEQ ID NO: 686 - protein, 10 aa, synthetic construct
  REGION 1..10: note = Synthetic
VHVRGDMATT

SEQ ID NO: 687 - protein, 10 aa, synthetic construct
  REGION 1..10: note = Synthetic
KDRRGDQTEY

SEQ ID NO: 688 - protein, 10 aa, synthetic construct
  REGION 1..10: note = Synthetic
TKQRGDTENY

SEQ ID NO: 689 - protein, 10 aa, synthetic construct
  REGION 1..10: note = Synthetic
SGERGDSMGL

SEQ ID NO: 690 - protein, 10 aa, synthetic construct
  REGION 1..10: note = Synthetic
TLARGDPKDA

SEQ ID NO: 691 - protein, 10 aa, synthetic construct
  REGION 1..10: note = Synthetic
MSVRGDLSTS

SEQ ID NO: 692 - protein, 10 aa, synthetic construct
  REGION 1..10: note = Synthetic
GYQRGDAMKL

SEQ ID NO: 693 - protein, 10 aa, synthetic construct
  REGION 1..10: note = Synthetic
DSSRGDRLSV

SEQ ID NO: 694 - protein, 10 aa, synthetic construct
  REGION 1..10: note = Synthetic
VNKRGDANEL

SEQ ID NO: 695 - protein, 10 aa, synthetic construct
  REGION 1..10: note = Synthetic
NERRGDSLYM

SEQ ID NO: 696 - protein, 10 aa, synthetic construct
  REGION 1..10: note = Synthetic
CAARGDLTNS

SEQ ID NO: 697 - protein, 10 aa, synthetic construct
  REGION 1..10: note = Synthetic
TTSRGDQYEK

SEQ ID NO: 698 - protein, 10 aa, synthetic construct
  REGION 1..10: note = Synthetic
ERTRGDIATQ

SEQ ID NO: 699 - protein, 10 aa, synthetic construct
  REGION 1..10: note = Synthetic
AAMRGDLSTT

SEQ ID NO: 700 - protein, 10 aa, synthetic construct
  REGION 1..10: note = Synthetic
TALRGDYAST

SEQ ID NO: 701 - protein, 10 aa, synthetic construct
  REGION 1..10: note = Synthetic
ASTRGDMSSS

SEQ ID NO: 702 - protein, 10 aa, synthetic construct
  REGION 1..10: note = Synthetic
AVGRGDSLRL

SEQ ID NO: 703 - protein, 10 aa, synthetic construct
  REGION 1..10: note = Synthetic
TRERGDTGHP

SEQ ID NO: 704 - protein, 10 aa, synthetic construct
  REGION 1..10: note = Synthetic
KYSRGDLSGE

SEQ ID NO: 705 - protein, 10 aa, synthetic construct
  REGION 1..10: note = Synthetic
SEVRGDILRS

SEQ ID NO: 706 - protein, 10 aa, synthetic construct
  REGION 1..10: note = Synthetic
MNKRGDHETQ

SEQ ID NO: 707 - protein, 10 aa, synthetic construct
  REGION 1..10: note = Synthetic
ASSRGDYDRV

SEQ ID NO: 708 - protein, 10 aa, synthetic construct
  REGION 1..10: note = Synthetic
SQLRGDNASS

SEQ ID NO: 709 - protein, 10 aa, synthetic construct
  REGION 1..10: note = Synthetic
NATRGDSGVT

SEQ ID NO: 710 - protein, 10 aa, synthetic construct
  REGION 1..10: note = Synthetic
STTRGDRMET

SEQ ID NO: 711 - protein, 10 aa, synthetic construct
  REGION 1..10: note = Synthetic
ASSRGDTSYL

SEQ ID NO: 712 - protein, 10 aa, synthetic construct
  REGION 1..10: note = Synthetic
DRTRGDLQSS

SEQ ID NO: 713 - protein, 10 aa, synthetic construct
  REGION 1..10: note = Synthetic
SNTRGDVVVT

SEQ ID NO: 714 - protein, 10 aa, synthetic construct
  REGION 1..10: note = Synthetic
ENARGDRTAM

SEQ ID NO: 715 - protein, 10 aa, synthetic construct
  REGION 1..10: note = Synthetic
NTNRGDATLH

SEQ ID NO: 716 - protein, 10 aa, synthetic construct
  REGION 1..10: note = Synthetic
HPGRGDSPTS

SEQ ID NO: 717 - protein, 10 aa, synthetic construct
  REGION 1..10: note = Synthetic
TSHRGDTLTT

SEQ ID NO: 718 - protein, 10 aa, synthetic construct
  REGION 1..10: note = Synthetic
KAPRGDNLPT

SEQ ID NO: 719 - protein, 10 aa, synthetic construct
  REGION 1..10: note = Synthetic
NMVRGDRDVL

SEQ ID NO: 720 - protein, 10 aa, synthetic construct
  REGION 1..10: note = Synthetic
GTSRGDFANV

SEQ ID NO: 721 - protein, 10 aa, synthetic construct
  REGION 1..10: note = Synthetic
ENKRGDVQQM

SEQ ID NO: 722 - protein, 10 aa, synthetic construct
  REGION 1..10: note = Synthetic
TANRGDTSSL

SEQ ID NO: 723 - protein, 10 aa, synthetic construct
  REGION 1..10: note = Synthetic
QSYRGDMSAS

SEQ ID NO: 724 - protein, 10 aa, synthetic construct
  REGION 1..10: note = Synthetic
NSARGDRLEL

SEQ ID NO: 725 - protein, 10 aa, synthetic construct
  REGION 1..10: note = Synthetic
TSNRGDRETF

SEQ ID NO: 726 - protein, 10 aa, synthetic construct
  REGION 1..10: note = Synthetic
SGVRGDVSVH

SEQ ID NO: 727 - protein, 10 aa, synthetic construct
  REGION 1..10: note = Synthetic
VTSRGDTASL

SEQ ID NO: 728 - protein, 10 aa, synthetic construct
  REGION 1..10: note = Synthetic
TGARGDTTVV

SEQ ID NO: 729 - protein, 10 aa, synthetic construct
  REGION 1..10: note = Synthetic
LVLRGDVRVM

SEQ ID NO: 730 - protein, 10 aa, synthetic construct
  REGION 1..10: note = Synthetic
SSARGDISGI

SEQ ID NO: 731 - protein, 10 aa, synthetic construct
  REGION 1..10: note = Synthetic
SNGRGDLHGS

SEQ ID NO: 732 - protein, 10 aa, synthetic construct
  REGION 1..10: note = Synthetic
VTGRGDTQYL

SEQ ID NO: 733 - protein, 10 aa, synthetic construct
  REGION 1..10: note = Synthetic
VVNRGDRTFN

SEQ ID NO: 734 - protein, 10 aa, synthetic construct
  REGION 1..10: note = Synthetic
LDKRGDPQWQ

SEQ ID NO: 735 - protein, 10 aa, synthetic construct
  REGION 1..10: note = Synthetic
QYRRGDYELS

SEQ ID NO: 736 - protein, 10 aa, synthetic construct
  REGION 1..10: note = Synthetic
VLPRGDQIIA

SEQ ID NO: 737 - protein, 10 aa, synthetic construct
  REGION 1..10: note = Synthetic
TSTRGDAAIV

SEQ ID NO: 738 - protein, 10 aa, synthetic construct
  REGION 1..10: note = Synthetic
TVFRGDRGND

SEQ ID NO: 739 - protein, 10 aa, synthetic construct
  REGION 1..10: note = Synthetic
SDSRGDTRGL

SEQ ID NO: 740 - protein, 10 aa, synthetic construct
  REGION 1..10: note = Synthetic
KDRRGDQTEY

SEQ ID NO: 741 - protein, 10 aa, synthetic construct
  REGION 1..10: note = Synthetic
TQLRGDLHPQ

SEQ ID NO: 742 - protein, 10 aa, synthetic construct
  REGION 1..10: note = Synthetic
MNGRGDASHI

SEQ ID NO: 743 - protein, 10 aa, synthetic construct
  REGION 1..10: note = Synthetic
WQSRGDRTIS

SEQ ID NO: 744 - protein, 10 aa, synthetic construct
  REGION 1..10: note = Synthetic
QDSRGDLSGK

SEQ ID NO: 745 - protein, 10 aa, synthetic construct
  REGION 1..10: note = Synthetic
SSARGDRADA

SEQ ID NO: 746 - protein, 10 aa, synthetic construct
  REGION 1..10: note = Synthetic
SSTRGDLTVN

SEQ ID NO: 747 - protein, 10 aa, synthetic construct
  REGION 1..10: note = Synthetic
ISPRGDSGGI

SEQ ID NO: 748 - protein, 10 aa, synthetic construct
  REGION 1..10: note = Synthetic
ANLRGDLHTP

SEQ ID NO: 749 - protein, 10 aa, synthetic construct
  REGION 1..10: note = Synthetic
TSSRGDLHFT

SEQ ID NO: 750 - protein, 10 aa, synthetic construct
  REGION 1..10: note = Synthetic
AATRGDTQTH

SEQ ID NO: 751 - protein, 10 aa, synthetic construct
  REGION 1..10: note = Synthetic
RDARGDLANS

SEQ ID NO: 752 - protein, 10 aa, synthetic construct
  REGION 1..10: note = Synthetic
YPHRGDQIMV

SEQ ID NO: 753 - protein, 10 aa, synthetic construct
  REGION 1..10: note = Synthetic
AGQRGDNWAQ

SEQ ID NO: 754 - protein, 10 aa, synthetic construct
  REGION 1..10: note = Synthetic
SARRGDQLEM

SEQ ID NO: 755 - protein, 10 aa, synthetic construct
  REGION 1..10: note = Synthetic
STGRGDQKLL

SEQ ID NO: 756 - protein, 10 aa, synthetic construct
  REGION 1..10: note = Synthetic
SLGRGDVSMV

SEQ ID NO: 757 - protein, 10 aa, synthetic construct
  REGION 1..10: note = Synthetic
ANERGDVSVL

SEQ ID NO: 758 - protein, 10 aa, synthetic construct
  REGION 1..10: note = Synthetic
SSIRGDLKLA

SEQ ID NO: 759 - protein, 10 aa, synthetic construct
  REGION 1..10: note = Synthetic
YSLRGDQHSS

SEQ ID NO: 760 - protein, 10 aa, synthetic construct
  REGION 1..10: note = Synthetic
STVRGDRAIT

SEQ ID NO: 761 - protein, 10 aa, synthetic construct
  REGION 1..10: note = Synthetic
HNSRGDPLGQ

SEQ ID NO: 762 - protein, 10 aa, synthetic construct
  REGION 1..10: note = Synthetic
RETRGDSSSF

SEQ ID NO: 763 - protein, 10 aa, synthetic construct
  REGION 1..10: note = Synthetic
VDKRGDLVLA

SEQ ID NO: 764 - protein, 10 aa, synthetic construct
  REGION 1..10: note = Synthetic
CNSRGDTQFL

SEQ ID NO: 765 - protein, 10 aa, synthetic construct
  REGION 1..10: note = Synthetic
TTARGDASQT

SEQ ID NO: 766 - protein, 10 aa, synthetic construct
  REGION 1..10: note = Synthetic
KMDRGDMAVS

SEQ ID NO: 767 - protein, 10 aa, synthetic construct
  REGION 1..10: note = Synthetic
KPTRGDTEHL

SEQ ID NO: 768 - protein, 10 aa, synthetic construct
  REGION 1..10: note = Synthetic
QYARGDPHAL

SEQ ID NO: 769 - protein, 10 aa, synthetic construct
  REGION 1..10: note = Synthetic
SSARGDTVAF

SEQ ID NO: 770 - protein, 10 aa, synthetic construct
  REGION 1..10: note = Synthetic
SERRGDLAPN

SEQ ID NO: 771 - protein, 10 aa, synthetic construct
  REGION 1..10: note = Synthetic
KFLRGDAGSS

SEQ ID NO: 772 - protein, 10 aa, synthetic construct
  REGION 1..10: note = Synthetic
QFNRGDQQRL

SEQ ID NO: 773 - protein, 10 aa, synthetic construct
  REGION 1..10: note = Synthetic
KFVRGDTLLP

SEQ ID NO: 774 - protein, 10 aa, synthetic construct
  REGION 1..10: note = Synthetic
EQRRGDHSAL

SEQ ID NO: 775 - protein, 10 aa, synthetic construct
  REGION 1..10: note = Synthetic
ADLRGDLRQS

SEQ ID NO: 776 - protein, 10 aa, synthetic construct
  REGION 1..10: note = Synthetic
SRVRGDRLED

SEQ ID NO: 777 - protein, 10 aa, synthetic construct
  REGION 1..10: note = Synthetic
SMTRGDTLRL

SEQ ID NO: 778 - protein, 10 aa, synthetic construct
  REGION 1..10: note = Synthetic
MSNRGDLREI

SEQ ID NO: 779 - protein, 10 aa, synthetic construct
  REGION 1..10: note = Synthetic
MLHRGDRMAV

SEQ ID NO: 780 - protein, 10 aa, synthetic construct
  REGION 1..10: note = Synthetic
NLQRGDRIPL

SEQ ID NO: 781 - protein, 10 aa, synthetic construct
  REGION 1..10: note = Synthetic
SSTRGDRLIS

SEQ ID NO: 782 - protein, 10 aa, synthetic construct
  REGION 1..10: note = Synthetic
EERRGDTHRL

SEQ ID NO: 783 - protein, 10 aa, synthetic construct
  REGION 1..10: note = Synthetic
MDKRGDQTIH

SEQ ID NO: 784 - protein, 10 aa, synthetic construct
  REGION 1..10: note = Synthetic
STKRGDLLSG

SEQ ID NO: 785 - protein, 10 aa, synthetic construct
  REGION 1..10: note = Synthetic
LIDRGDRMER

SEQ ID NO: 786 - protein, 10 aa, synthetic construct
  REGION 1..10: note = Synthetic
GRVRGDIVVV

SEQ ID NO: 787 - protein, 10 aa, synthetic construct
  REGION 1..10: note = Synthetic
DKLRGDLRLQ

SEQ ID NO: 788 - protein, 10 aa, synthetic construct
  REGION 1..10: note = Synthetic
NPTRGDNIGY

SEQ ID NO: 789 - protein, 10 aa, synthetic construct
  REGION 1..10: note = Synthetic
ELRRGDSANT

SEQ ID NO: 790 - protein, 10 aa, synthetic construct
  REGION 1..10: note = Synthetic
TAHRGDTSSI

SEQ ID NO: 791 - protein, 10 aa, synthetic construct
  REGION 1..10: note = Synthetic
HSTRGDRHLD

SEQ ID NO: 792 - protein, 10 aa, synthetic construct
  REGION 1..10: note = Synthetic
SATRGDLLST

SEQ ID NO: 793 - protein, 10 aa, synthetic construct
  REGION 1..10: note = Synthetic
TSSRGDSHAL

SEQ ID NO: 794 - protein, 10 aa, synthetic construct
  REGION 1..10: note = Synthetic
DANRGDLRDK

SEQ ID NO: 795 - protein, 10 aa, synthetic construct
  REGION 1..10: note = Synthetic
IDRRGDVRDM

SEQ ID NO: 796 - protein, 10 aa, synthetic construct
  REGION 1..10: note = Synthetic
TGTRGDLSTT

SEQ ID NO: 797 - protein, 10 aa, synthetic construct
  REGION 1..10: note = Synthetic
SNSRGDVALV

SEQ ID NO: 798 - protein, 10 aa, synthetic construct
  REGION 1..10: note = Synthetic
SYTRGDQHGL

SEQ ID NO: 799 - protein, 10 aa, synthetic construct
  REGION 1..10: note = Synthetic
GVLPQQGTPR

SEQ ID NO: 800 - protein, 10 aa, synthetic construct
  REGION 1..10: note = Synthetic
SERPEQGTQR

SEQ ID NO: 801 - protein, 10 aa, synthetic construct
  REGION 1..10: note = Synthetic
MTVPNQGTNR

SEQ ID NO: 802 - protein, 10 aa, synthetic construct
  REGION 1..10: note = Synthetic
NNTPSQGTSR

SEQ ID NO: 803 - protein, 10 aa, synthetic construct
  REGION 1..10: note = Synthetic
SRDPPQGTTR

SEQ ID NO: 804 - protein, 10 aa, synthetic construct
  REGION 1..10: note = Synthetic
GTVPSQGTSR

SEQ ID NO: 805 - protein, 10 aa, synthetic construct
  REGION 1..10: note = Synthetic
SFLPNQGTAR

SEQ ID NO: 806 - protein, 10 aa, synthetic construct
  REGION 1..10: note = Synthetic
SGDPSQGTYR

SEQ ID NO: 807 - protein, 10 aa, synthetic construct
  REGION 1..10: note = Synthetic
SREPNQGTPR

SEQ ID NO: 808 - protein, 10 aa, synthetic construct
  REGION 1..10: note = Synthetic
NSEPYQGTQR

SEQ ID NO: 809 - protein, 10 aa, synthetic construct
  REGION 1..10: note = Synthetic
IEGPTQGTSR

SEQ ID NO: 810 - protein, 10 aa, synthetic construct
  REGION 1..10: note = Synthetic
SSLPGQGTMR

SEQ ID NO: 811 - protein, 10 aa, synthetic construct
  REGION 1..10: note = Synthetic
STAPVQGTNR

SEQ ID NO: 812 - protein, 10 aa, synthetic construct
  REGION 1..10: note = Synthetic
DYSPGQGTVR

SEQ ID NO: 813 - protein, 10 aa, synthetic construct
  REGION 1..10: note = Synthetic
GSVPAQGTTR

SEQ ID NO: 814 - protein, 10 aa, synthetic construct
  REGION 1..10: note = Synthetic
NTNPDQGTMR

SEQ ID NO: 815 - protein, 10 aa, synthetic construct
  REGION 1..10: note = Synthetic
DDSPRQGTMR

SEQ ID NO: 816 - protein, 10 aa, synthetic construct
  REGION 1..10: note = Synthetic
SGQPEQGTAR

SEQ ID NO: 817 - protein, 10 aa, synthetic construct
  REGION 1..10: note = Synthetic
ERTPVQGTDR

SEQ ID NO: 818 - protein, 10 aa, synthetic construct
  REGION 1..10: note = Synthetic
ASTPSQGTER

SEQ ID NO: 819 - protein, 10 aa, synthetic construct
  REGION 1..10: note = Synthetic
GAVPTQGTPR

SEQ ID NO: 820 - protein, 10 aa, synthetic construct
  REGION 1..10: note = Synthetic
AGTPVQGTSR

SEQ ID NO: 821 - protein, 10 aa, synthetic construct
  REGION 1..10: note = Synthetic
NVNPNQGTDR

SEQ ID NO: 822 - protein, 10 aa, synthetic construct
  REGION 1..10: note = Synthetic
AREPVQGTVR

SEQ ID NO: 823 - protein, 10 aa, synthetic construct
  REGION 1..10: note = Synthetic
SSVPKQGTER

SEQ ID NO: 824 - protein, 10 aa, synthetic construct
  REGION 1..10: note = Synthetic
ESRPNQGTDR

SEQ ID NO: 825 - protein, 10 aa, synthetic construct
  REGION 1..10: note = Synthetic
EGVPIQGTHR

SEQ ID NO: 826 - protein, 10 aa, synthetic construct
  REGION 1..10: note = Synthetic
SKDPVQGTVR

SEQ ID NO: 827 - protein, 10 aa, synthetic construct
  REGION 1..10: note = Synthetic
MEPPHQGTGR

SEQ ID NO: 828 - protein, 10 aa, synthetic construct
  REGION 1..10: note = Synthetic
AISPNQGTTR

SEQ ID NO: 829 - protein, 10 aa, synthetic construct
  REGION 1..10: note = Synthetic
TRDPGQGTNR

SEQ ID NO: 830 - protein, 10 aa, synthetic construct
  REGION 1..10: note = Synthetic
QASPVQGTTR

SEQ ID NO: 831 - protein, 10 aa, synthetic construct
  REGION 1..10: note = Synthetic
GAHPSQGTDR

SEQ ID NO: 832 - protein, 10 aa, synthetic construct
  REGION 1..10: note = Synthetic
GYQPAQGTGR

SEQ ID NO: 833 - protein, 10 aa, synthetic construct
  REGION 1..10: note = Synthetic
MDNPLQGTLR

SEQ ID NO: 834 - protein, 10 aa, synthetic construct
  REGION 1..10: note = Synthetic
MSVPPQGTGR

SEQ ID NO: 835 - protein, 10 aa, synthetic construct
  REGION 1..10: note = Synthetic
SATPPQGTNR

SEQ ID NO: 836 - protein, 10 aa, synthetic construct
  REGION 1..10: note = Synthetic
NNGPDQGTNR

SEQ ID NO: 837 - protein, 10 aa, synthetic construct
  REGION 1..10: note = Synthetic
TDGPGQGTSR

SEQ ID NO: 838 - protein, 10 aa, synthetic construct
  REGION 1..10: note = Synthetic
SGNPTQGTMR

SEQ ID NO: 839 - protein, 10 aa, synthetic construct
  REGION 1..10: note = Synthetic
MEGPSQGTMR

SEQ ID NO: 840 - protein, 10 aa, synthetic construct
  REGION 1..10: note = Synthetic
TADPYQGTGR

SEQ ID NO: 841 - protein, 10 aa, synthetic construct
  REGION 1..10: note = Synthetic
AMNPVQGTPR

SEQ ID NO: 842 - protein, 10 aa, synthetic construct
  REGION 1..10: note = Synthetic
ADSPQQGTLR

SEQ ID NO: 843 - protein, 10 aa, synthetic construct
  REGION 1..10: note = Synthetic
TQVPTQGTVR

SEQ ID NO: 844 - protein, 10 aa, synthetic construct
  REGION 1..10: note = Synthetic
RGDPIQGTLR

SEQ ID NO: 845 - protein, 10 aa, synthetic construct
  REGION 1..10: note = Synthetic
SGPPYQGTER

SEQ ID NO: 846 - protein, 10 aa, synthetic construct
  REGION 1..10: note = Synthetic
TSNPVQGTGR

SEQ ID NO: 847 - protein, 10 aa, synthetic construct
  REGION 1..10: note = Synthetic
IVSPVQGTTR

SEQ ID NO: 848 - protein, 10 aa, synthetic construct
  REGION 1..10: note = Synthetic
AGEPMQGTVR

SEQ ID NO: 849 - protein, 10 aa, synthetic construct
  REGION 1..10: note = Synthetic
SGEPNQGTLR

SEQ ID NO: 850 - protein, 10 aa, synthetic construct
  REGION 1..10: note = Synthetic
STTPLQGTTR

SEQ ID NO: 851 - protein, 10 aa, synthetic construct
  REGION 1..10: note = Synthetic
GDEPRQGTTR

SEQ ID NO: 852 - protein, 10 aa, synthetic construct
  REGION 1..10: note = Synthetic
EMGPRQGTDR

SEQ ID NO: 853 - protein, 10 aa, synthetic construct
  REGION 1..10: note = Synthetic
GTTPMQGTSR

SEQ ID NO: 854 - protein, 10 aa, synthetic construct
  REGION 1..10: note = Synthetic
GQKPDQGTVR

SEQ ID NO: 855 - protein, 10 aa, synthetic construct
  REGION 1..10: note = Synthetic
TAIPSQGTSR

SEQ ID NO: 856 - protein, 10 aa, synthetic construct
  REGION 1..10: note = Synthetic
SVLPSQGTQR

SEQ ID NO: 857 - protein, 10 aa, synthetic construct
  REGION 1..10: note = Synthetic
SYNPSQGTVR

SEQ ID NO: 858 - protein, 10 aa, synthetic construct
  REGION 1..10: note = Synthetic
DAKPSQGTSR

SEQ ID NO: 859 - protein, 10 aa, synthetic construct
  REGION 1..10: note = Synthetic
MMAPLQGTDR

SEQ ID NO: 860 - protein, 10 aa, synthetic construct
  REGION 1..10: note = Synthetic
AEHPVQGTMR

SEQ ID NO: 861 - protein, 10 aa, synthetic construct
  REGION 1..10: note = Synthetic
SASPVQGTSR

SEQ ID NO: 862 - protein, 10 aa, synthetic construct
  REGION 1..10: note = Synthetic
ETNPRQGTDR

SEQ ID NO: 863 - protein, 10 aa, synthetic construct
  REGION 1..10: note = Synthetic
ALLPTQGTAR

SEQ ID NO: 864 - protein, 10 aa, synthetic construct
  REGION 1..10: note = Synthetic
GEAPSQGTNR

SEQ ID NO: 865 - protein, 10 aa, synthetic construct
  REGION 1..10: note = Synthetic
SWEPRQGTDR

SEQ ID NO: 866 - protein, 10 aa, synthetic construct
  REGION 1..10: note = Synthetic
WVSPKQGTER

SEQ ID NO: 867 - protein, 10 aa, synthetic construct
  REGION 1..10: note = Synthetic
YDGPSQGTSR

SEQ ID NO: 868 - protein, 10 aa, synthetic construct
  REGION 1..10: note = Synthetic
GTQPTQGTSR

SEQ ID NO: 869 - protein, 10 aa, synthetic construct
  REGION 1..10: note = Synthetic
NEVPRQGTPR

SEQ ID NO: 870 - protein, 10 aa, synthetic construct
  REGION 1..10: note = Synthetic
GSTPMQGTAR

SEQ ID NO: 871 - protein, 10 aa, synthetic construct
  REGION 1..10: note = Synthetic
LPRPVQGTDR

SEQ ID NO: 872 - protein, 10 aa, synthetic construct
  REGION 1..10: note = Synthetic
HALPSQGTDR

SEQ ID NO: 873 - protein, 10 aa, synthetic construct
  REGION 1..10: note = Synthetic
SWDPSQGTIR

SEQ ID NO: 874 - protein, 10 aa, synthetic construct
  REGION 1..10: note = Synthetic
TQLPTQGTIR

SEQ ID NO: 875 - protein, 10 aa, synthetic construct
  REGION 1..10: note = Synthetic
AVYPEQGTSR

SEQ ID NO: 876 - protein, 10 aa, synthetic construct
  REGION 1..10: note = Synthetic
NETPTQGTTR

SEQ ID NO: 877 - protein, 10 aa, synthetic construct
  REGION 1..10: note = Synthetic
QTGPTQGTER

SEQ ID NO: 878 - protein, 10 aa, synthetic construct
  REGION 1..10: note = Synthetic
TQVPTQGTVR

SEQ ID NO: 879 - protein, 10 aa, synthetic construct
  REGION 1..10: note = Synthetic
TMGPNQGTTR

SEQ ID NO: 880 - protein, 10 aa, synthetic construct
  REGION 1..10: note = Synthetic
GTMPDQGTLR

SEQ ID NO: 881 - protein, 10 aa, synthetic construct
  REGION 1..10: note = Synthetic
SESPVQGTVR

SEQ ID NO: 882 - protein, 10 aa, synthetic construct
  REGION 1..10: note = Synthetic
TVTPVQGTSR

SEQ ID NO: 883 - protein, 10 aa, synthetic construct
  REGION 1..10: note = Synthetic
REYPIQGTER

SEQ ID NO: 884 - protein, 10 aa, synthetic construct
  REGION 1..10: note = Synthetic
WYEPKQGTAR

SEQ ID NO: 885 - protein, 10 aa, synthetic construct
  REGION 1..10: note = Synthetic
AENPRQGTER

SEQ ID NO: 886 - protein, 10 aa, synthetic construct
  REGION 1..10: note = Synthetic
STSPIQGTTR

SEQ ID NO: 887 - protein, 10 aa, synthetic construct
  REGION 1..10: note = Synthetic
TMSPPQGTGR

SEQ ID NO: 888 - protein, 10 aa, synthetic construct
  REGION 1..10: note = Synthetic
MEHPYQGTGR

SEQ ID NO: 889 - protein, 10 aa, synthetic construct
  REGION 1..10: note = Synthetic
EAYPKQGTER

SEQ ID NO: 890 - protein, 10 aa, synthetic construct
  REGION 1..10: note = Synthetic
TTEPTQGTQR

SEQ ID NO: 891 - protein, 10 aa, synthetic construct
  REGION 1..10: note = Synthetic
EVGPTQGTTR

SEQ ID NO: 892 - protein, 10 aa, synthetic construct
  REGION 1..10: note = Synthetic
NSTPDQGTHR

SEQ ID NO: 893 - protein, 10 aa, synthetic construct
  REGION 1..10: note = Synthetic
DAQPKQGTGR

SEQ ID NO: 894 - protein, 10 aa, synthetic construct
  REGION 1..10: note = Synthetic
SGVPVQGTVR

SEQ ID NO: 895 - protein, 10 aa, synthetic construct
  REGION 1..10: note = Synthetic
NGEPLQGTMR

SEQ ID NO: 896 - protein, 10 aa, synthetic construct
  REGION 1..10: note = Synthetic
VSVPGQGTLR

SEQ ID NO: 897 - protein, 10 aa, synthetic construct
  REGION 1..10: note = Synthetic
EFAPSQGTAR

SEQ ID NO: 898 - protein, 10 aa, synthetic construct
  REGION 1..10: note = Synthetic
DGNPQQGTGR

SEQ ID NO: 899 - protein, 10 aa, synthetic construct
  REGION 1..10: note = Synthetic
QNMPLQGTGR

SEQ ID NO: 900 - protein, 10 aa, synthetic construct
  REGION 1..10: note = Synthetic
WLGPNQGTDR

SEQ ID NO: 901 - protein, 10 aa, synthetic construct
  REGION 1..10: note = Synthetic
SSMPVQGTDR

SEQ ID NO: 902 - protein, 10 aa, synthetic construct
  REGION 1..10: note = Synthetic
EGAPGQGTGR

SEQ ID NO: 903 - protein, 10 aa, synthetic construct
  REGION 1..10: note = Synthetic
MVNPIQGTGR

SEQ ID NO: 904 - protein, 10 aa, synthetic construct
  REGION 1..10: note = Synthetic
SDMPGQGTGR

SEQ ID NO: 905 - protein, 10 aa, synthetic construct
  REGION 1..10: note = Synthetic
GDDPRQGTVR

SEQ ID NO: 906 - protein, 10 aa, synthetic construct
  REGION 1..10: note = Synthetic
ATMPTQGTPR

SEQ ID NO: 907 - protein, 10 aa, synthetic construct
  REGION 1..10: note = Synthetic
GGDPGQGTVR

SEQ ID NO: 908 - protein, 10 aa, synthetic construct
  REGION 1..10: note = Synthetic
TGSPIQGTLR

SEQ ID NO: 909 - protein, 10 aa, synthetic construct
  REGION 1..10: note = Synthetic
AEGPNQGTLR

SEQ ID NO: 910 - protein, 10 aa, synthetic construct
  REGION 1..10: note = Synthetic
SDGPGQGTAR

SEQ ID NO: 911 - protein, 10 aa, synthetic construct
  REGION 1..10: note = Synthetic
QNGPDQGTNR

SEQ ID NO: 912 - protein, 10 aa, synthetic construct
  REGION 1..10: note = Synthetic
EMIPVQGTGR

SEQ ID NO: 913 - protein, 10 aa, synthetic construct
  REGION 1..10: note = Synthetic
VERPPQGTDR

SEQ ID NO: 914 - protein, 10 aa, synthetic construct
  REGION 1..10: note = Synthetic
GTSPGQGTTR

SEQ ID NO: 915 - protein, 10 aa, synthetic construct
  REGION 1..10: note = Synthetic
QTMPPQGTVR

SEQ ID NO: 916 - protein, 10 aa, synthetic construct
  REGION 1..10: note = Synthetic
ESYPTQGTAR

SEQ ID NO: 917 - protein, 10 aa, synthetic construct
  REGION 1..10: note = Synthetic
DAVPKQGTVR

SEQ ID NO: 918 - protein, 10 aa, synthetic construct
  REGION 1..10: note = Synthetic
AEMPEQGTRR

SEQ ID NO: 919 - protein, 10 aa, synthetic construct
  REGION 1..10: note = Synthetic
SKDPIQGTTR

SEQ ID NO: 920 - protein, 10 aa, synthetic construct
  REGION 1..10: note = Synthetic
TASPIQGTGR

SEQ ID NO: 921 - protein, 10 aa, synthetic construct
  REGION 1..10: note = Synthetic
AGTPEQGTLR

SEQ ID NO: 922 - protein, 10 aa, synthetic construct
  REGION 1..10: note = Synthetic
SHDPSQGTLR

SEQ ID NO: 923 - protein, 10 aa, synthetic construct
  REGION 1..10: note = Synthetic
QYLPTQGTDR

SEQ ID NO: 924 - protein, 10 aa, synthetic construct
  REGION 1..10: note = Synthetic
MLRPVQGTDR

SEQ ID NO: 925 - protein, 10 aa, synthetic construct
  REGION 1..10: note = Synthetic
QAGPTQGTYR

SEQ ID NO: 926 - protein, 10 aa, synthetic construct
  REGION 1..10: note = Synthetic
EHSPLQGTSR

SEQ ID NO: 927 - protein, 10 aa, synthetic construct
  REGION 1..10: note = Synthetic
SASPTQGTLR

SEQ ID NO: 928 - protein, 10 aa, synthetic construct
  REGION 1..10: note = Synthetic
DTKPSQGTGR

SEQ ID NO: 929 - protein, 10 aa, synthetic construct
  REGION 1..10: note = Synthetic
MVVPIQGTGR

SEQ ID NO: 930 - protein, 10 aa, synthetic construct
  REGION 1..10: note = Synthetic
GTVPPQGTSR

SEQ ID NO: 931 - protein, 10 aa, synthetic construct
  REGION 1..10: note = Synthetic
EGAPIQGTAR

SEQ ID NO: 932 - protein, 10 aa, synthetic construct
  REGION 1..10: note = Synthetic
STVPNQGTTR

SEQ ID NO: 933 - protein, 10 aa, synthetic construct
  REGION 1..10: note = Synthetic
EGNPSQGTYR

SEQ ID NO: 934 - protein, 10 aa, synthetic construct
  REGION 1..10: note = Synthetic
SEGPHQGTLR

SEQ ID NO: 935 - protein, 10 aa, synthetic construct
  REGION 1..10: note = Synthetic
LDRPNQGTER

SEQ ID NO: 936 - protein, 10 aa, synthetic construct
  REGION 1..10: note = Synthetic
SSIPVQGTVR

SEQ ID NO: 937 - protein, 10 aa, synthetic construct
  REGION 1..10: note = Synthetic
AEVPHQGTNR

SEQ ID NO: 938 - protein, 10 aa, synthetic construct
  REGION 1..10: note = Synthetic
AAAPGQGTTR

SEQ ID NO: 939 - protein, 10 aa, synthetic construct
  REGION 1..10: note = Synthetic
LANPVQGTAR

SEQ ID NO: 940 - protein, 10 aa, synthetic construct
  REGION 1..10: note = Synthetic
MPMPGQGTGR

SEQ ID NO: 941 - protein, 10 aa, synthetic construct
  REGION 1..10: note = Synthetic
MSYPHQGTER

SEQ ID NO: 942 - protein, 10 aa, synthetic construct
  REGION 1..10: note = Synthetic
EGSPVQGTSR

SEQ ID NO: 943 - protein, 10 aa, synthetic construct
  REGION 1..10: note = Synthetic
EALPRQGTDR

SEQ ID NO: 944 - protein, 10 aa, synthetic construct
  REGION 1..10: note = Synthetic
ESYPRQGTDR

SEQ ID NO: 945 - protein, 10 aa, synthetic construct
  REGION 1..10: note = Synthetic
NASPGQGTSR

SEQ ID NO: 946 - protein, 10 aa, synthetic construct
  REGION 1..10: note = Synthetic
ENSPSQGTFR

SEQ ID NO: 947 - protein, 10 aa, synthetic construct
  REGION 1..10: note = Synthetic
LVMRGDTHSS

SEQ ID NO: 948 - protein, 10 aa, synthetic construct
  REGION 1..10: note = Synthetic
TLLRGDHSLT

SEQ ID NO: 949 - protein, 10 aa, synthetic construct
  REGION 1..10: note = Synthetic
TSTRGDVENR

SEQ ID NO: 950 - protein, 10 aa, synthetic construct
  REGION 1..10: note = Synthetic
NVSRGDVTRN

SEQ ID NO: 951 - protein, 10 aa, synthetic construct
  REGION 1..10: note = Synthetic
KYERGDVIQL

SEQ ID NO: 952 - protein, 10 aa, synthetic construct
  REGION 1..10: note = Synthetic
LTVRGDQSFQ

SEQ ID NO: 953 - protein, 10 aa, synthetic construct
  REGION 1..10: note = Synthetic
SALRGDGPLP

SEQ ID NO: 954 - protein, 10 aa, synthetic construct
  REGION 1..10: note = Synthetic
NVIRGDNSTT

SEQ ID NO: 955 - protein, 10 aa, synthetic construct
  REGION 1..10: note = Synthetic
SSNRGDVLTS

SEQ ID NO: 956 - protein, 10 aa, synthetic construct
  REGION 1..10: note = Synthetic
MHNRGDNQYT

SEQ ID NO: 957 - protein, 10 aa, synthetic construct
  REGION 1..10: note = Synthetic
NTSRGDSSST

SEQ ID NO: 958 - protein, 10 aa, synthetic construct
  REGION 1..10: note = Synthetic
SNFRGDSSVT

SEQ ID NO: 959 - protein, 10 aa, synthetic construct
  REGION 1..10: note = Synthetic
ATNRGDGRNL

SEQ ID NO: 960 - protein, 10 aa, synthetic construct
  REGION 1..10: note = Synthetic
NHGRGDPATL

SEQ ID NO: 961 - protein, 10 aa, synthetic construct
  REGION 1..10: note = Synthetic
TRERGDGNQE

SEQ ID NO: 962 - protein, 10 aa, synthetic construct
  REGION 1..10: note = Synthetic
TSDRGDTKPL

SEQ ID NO: 963 - protein, 10 aa, synthetic construct
  REGION 1..10: note = Synthetic
LTERGDRDRA

SEQ ID NO: 964 - protein, 10 aa, synthetic construct
  REGION 1..10: note = Synthetic
ERSRGDSSTT

SEQ ID NO: 965 - protein, 10 aa, synthetic construct
  REGION 1..10: note = Synthetic
GYNRGDDPPS

SEQ ID NO: 966 - protein, 10 aa, synthetic construct
  REGION 1..10: note = Synthetic
QSTRGDVLTS

SEQ ID NO: 967 - protein, 10 aa, synthetic construct
  REGION 1..10: note = Synthetic
NTTRGDQNPI

SEQ ID NO: 968 - protein, 10 aa, synthetic construct
  REGION 1..10: note = Synthetic
TNGRGDLTGT

SEQ ID NO: 969 - protein, 10 aa, synthetic construct
  REGION 1..10: note = Synthetic
SNQRGDSTRL

SEQ ID NO: 970 - protein, 10 aa, synthetic construct
  REGION 1..10: note = Synthetic
YRARGDGAID

SEQ ID NO: 971 - protein, 10 aa, synthetic construct
  REGION 1..10: note = Synthetic
QTLRGDNTPT

SEQ ID NO: 972 - protein, 10 aa, synthetic construct
  REGION 1..10: note = Synthetic
ELGRGDQHAR

SEQ ID NO: 973 - protein, 10 aa, synthetic construct
  REGION 1..10: note = Synthetic
SSFRGDNSER

SEQ ID NO: 974 - protein, 10 aa, synthetic construct
  REGION 1..10: note = Synthetic
THVRGDIVHN

SEQ ID NO: 975 - protein, 10 aa, synthetic construct
  REGION 1..10: note = Synthetic
VWQRGDITMN

SEQ ID NO: 976 - protein, 10 aa, synthetic construct
  REGION 1..10: note = Synthetic
TANRGDNTVT

SEQ ID NO: 977 - protein, 10 aa, synthetic construct
  REGION 1..10: note = Synthetic
ASVRGDSAMT

SEQ ID NO: 978 - protein, 10 aa, synthetic construct
  REGION 1..10: note = Synthetic
ESLRGDISTT

SEQ ID NO: 979 - protein, 10 aa, synthetic construct
  REGION 1..10: note = Synthetic
TSSRGDSTSV

SEQ ID NO: 980 - protein, 10 aa, synthetic construct
  REGION 1..10: note = Synthetic
LPTRGDTATT

SEQ ID NO: 981 - protein, 10 aa, synthetic construct
  REGION 1..10: note = Synthetic
MRDRGDTALE

SEQ ID NO: 982 - protein, 10 aa, synthetic construct
  REGION 1..10: note = Synthetic
DKPRGDFGTS

SEQ ID NO: 983 - protein, 10 aa, synthetic construct
  REGION 1..10: note = Synthetic
SRLRGDELNS

SEQ ID NO: 984 - protein, 10 aa, synthetic construct
  REGION 1..10: note = Synthetic
TNLRGDGKHT

SEQ ID NO: 985 - protein, 10 aa, synthetic construct
  REGION 1..10: note = Synthetic
LQGRGDPQVA

SEQ ID NO: 986 - protein, 10 aa, synthetic construct
  REGION 1..10: note = Synthetic
SVPRGDSAGL

SEQ ID NO: 987 - protein, 10 aa, synthetic construct
  REGION 1..10: note = Synthetic
SELRGDYPVN

SEQ ID NO: 988 - protein, 10 aa, synthetic construct
  REGION 1..10: note = Synthetic
GGLRGDASNP

SEQ ID NO: 989 - protein, 10 aa, synthetic construct
  REGION 1..10: note = Synthetic
DLNRGDVQRP

SEQ ID NO: 990 - protein, 10 aa, synthetic construct
  REGION 1..10: note = Synthetic
EQQRGDKAIT

SEQ ID NO: 991 - protein, 10 aa, synthetic construct
  REGION 1..10: note = Synthetic
RTFRGDPNVQ

SEQ ID NO: 992 - protein, 10 aa, synthetic construct
  REGION 1..10: note = Synthetic
RATRGDSAET

SEQ ID NO: 993 - protein, 10 aa, synthetic construct
  REGION 1..10: note = Synthetic
SYYRGDPQST

SEQ ID NO: 994 - protein, 10 aa, synthetic construct
  REGION 1..10: note = Synthetic
RTVRGDVSNP

SEQ ID NO: 995 - protein, 10 aa, synthetic construct
  REGION 1..10: note = Synthetic
SNNRGDGSFT

SEQ ID NO: 996 - protein, 10 aa, synthetic construct
  REGION 1..10: note = Synthetic
TGGRGDAHEW

SEQ ID NO: 997 - protein, 10 aa, synthetic construct
  REGION 1..10: note = Synthetic
MQTRGDPKML

SEQ ID NO: 998 - protein, 10 aa, synthetic construct
  REGION 1..10: note = Synthetic
LGIRGDPHTT

SEQ ID NO: 999 - protein, 10 aa, synthetic construct
  REGION 1..10: note = Synthetic
QLGRGDTNER

SEQ ID NO: 1000 - protein, 10 aa, synthetic construct
  REGION 1..10: note = Synthetic
AVIRGDNVML

SEQ ID NO: 1001 - protein, 10 aa, synthetic construct
  REGION 1..10: note = Synthetic
VDRRGDVSAE

SEQ ID NO: 1002 - protein, 10 aa, synthetic construct
  REGION 1..10: note = Synthetic
VTLRGDKNST

SEQ ID NO: 1003 - protein, 10 aa, synthetic construct
  REGION 1..10: note = Synthetic
SMLRGDTRIS

SEQ ID NO: 1004 - protein, 10 aa, synthetic construct
  REGION 1..10: note = Synthetic
WTHRGDPSER

SEQ ID NO: 1005 - protein, 10 aa, synthetic construct
  REGION 1..10: note = Synthetic
LAVRGDVSHG

SEQ ID NO: 1006 - protein, 10 aa, synthetic construct
  REGION 1..10: note = Synthetic
MWLRGDSTVS

SEQ ID NO: 1007 - protein, 10 aa, synthetic construct
  REGION 1..10: note = Synthetic
SVKRGDGEPF

SEQ ID NO: 1008 - protein, 10 aa, synthetic construct
  REGION 1..10: note = Synthetic
TGRRGDNLEL

SEQ ID NO: 1009 - protein, 10 aa, synthetic construct
  REGION 1..10: note = Synthetic
TYMRGDTNQQ

SEQ ID NO: 1010 - protein, 10 aa, synthetic construct
  REGION 1..10: note = Synthetic
SNVRGDTLTT

SEQ ID NO: 1011 - protein, 10 aa, synthetic construct
  REGION 1..10: note = Synthetic
TWTRGDDAKL

SEQ ID NO: 1012 - protein, 10 aa, synthetic construct
  REGION 1..10: note = Synthetic
MSIRGDSQAQ

SEQ ID NO: 1013 - protein, 10 aa, synthetic construct
  REGION 1..10: note = Synthetic
LFTRGDSMVT

SEQ ID NO: 1014 - protein, 10 aa, synthetic construct
  REGION 1..10: note = Synthetic
YKERGDPLAP

SEQ ID NO: 1015 - protein, 10 aa, synthetic construct
  REGION 1..10: note = Synthetic
TPVRGDVTPS

SEQ ID NO: 1016 - protein, 10 aa, synthetic construct
  REGION 1..10: note = Synthetic
EVVRGDPSNY

SEQ ID NO: 1017 - protein, 10 aa, synthetic construct
  REGION 1..10: note = Synthetic
DTKRGDVAPR

SEQ ID NO: 1018 - protein, 10 aa, synthetic construct
  REGION 1..10: note = Synthetic
ITYRGDNSTL

SEQ ID NO: 1019 - protein, 10 aa, synthetic construct
  REGION 1..10: note = Synthetic
LNGRGDNLYE

SEQ ID NO: 1020 - protein, 10 aa, synthetic construct
  REGION 1..10: note = Synthetic
CTERGDQVSN

SEQ ID NO: 1021 - protein, 10 aa, synthetic construct
  REGION 1..10: note = Synthetic
TMHRGDNNRV

SEQ ID NO: 1022 - protein, 10 aa, synthetic construct
  REGION 1..10: note = Synthetic
TRDRGDNLTE

SEQ ID NO: 1023 - protein, 10 aa, synthetic construct
  REGION 1..10: note = Synthetic
YVLRGDSSSH

SEQ ID NO: 1024 - protein, 10 aa, synthetic construct
  REGION 1..10: note = Synthetic
GPTRGDSVLT

SEQ ID NO: 1025 - protein, 10 aa, synthetic construct
  REGION 1..10: note = Synthetic
TWMRGDDTHS

SEQ ID NO: 1026 - protein, 10 aa, synthetic construct
  REGION 1..10: note = Synthetic
TGTRGDTDII

SEQ ID NO: 1027 - protein, 10 aa, synthetic construct
  REGION 1..10: note = Synthetic
TNARGDGFQG

SEQ ID NO: 1028 - protein, 10 aa, synthetic construct
  REGION 1..10: note = Synthetic
TTHRGDPLPA

SEQ ID NO: 1029 - protein, 10 aa, synthetic construct
  REGION 1..10: note = Synthetic
SLGRGDRSEG

SEQ ID NO: 1030 - protein, 10 aa, synthetic construct
  REGION 1..10: note = Synthetic
ELSRGDTVTV

SEQ ID NO: 1031 - protein, 10 aa, synthetic construct
  REGION 1..10: note = Synthetic
GTLRGDNSPL

SEQ ID NO: 1032 - protein, 10 aa, synthetic construct
  REGION 1..10: note = Synthetic
MALRGDGVSG

SEQ ID NO: 1033 - protein, 10 aa, synthetic construct
  REGION 1..10: note = Synthetic
NAYRGDKTQA

SEQ ID NO: 1034 - protein, 10 aa, synthetic construct
  REGION 1..10: note = Synthetic
GAARGDGAGA

SEQ ID NO: 1035 - protein, 10 aa, synthetic construct
  REGION 1..10: note = Synthetic
TSWRGDSRDL

SEQ ID NO: 1036 - protein, 10 aa, synthetic construct
  REGION 1..10: note = Synthetic
VTLRGDNSRE

SEQ ID NO: 1037 - protein, 10 aa, synthetic construct
  REGION 1..10: note = Synthetic
VTERGDDRAL

SEQ ID NO: 1038 - protein, 10 aa, synthetic construct
  REGION 1..10: note = Synthetic
TSTRGDTLMT

SEQ ID NO: 1039 - protein, 10 aa, synthetic construct
  REGION 1..10: note = Synthetic
TDARGDAGQA

SEQ ID NO: 1040 - protein, 10 aa, synthetic construct
  REGION 1..10: note = Synthetic
TRDRGDHAPT

SEQ ID NO: 1041 - protein, 10 aa, synthetic construct
  REGION 1..10: note = Synthetic
SGTRGDTVDA

SEQ ID NO: 1042 - protein, 10 aa, synthetic construct
  REGION 1..10: note = Synthetic
SGNRGDSAST

SEQ ID NO: 1043 - protein, 10 aa, synthetic construct
  REGION 1..10: note = Synthetic
SSMRGDDSHY

SEQ ID NO: 1044 - protein, 10 aa, synthetic construct
  REGION 1..10: note = Synthetic
EGARGDKQAT

SEQ ID NO: 1045 - protein, 10 aa, synthetic construct
  REGION 1..10: note = Synthetic
LSSRGDLQER

SEQ ID NO: 1046 - protein, 10 aa, synthetic construct
  REGION 1..10: note = Synthetic
QLERGDNSSS

SEQ ID NO: 1047 - protein, 10 aa, synthetic construct
  REGION 1..10: note = Synthetic
VVARGDVVAL

SEQ ID NO: 1048 - protein, 10 aa, synthetic construct
  REGION 1..10: note = Synthetic
RQTRGDTTSA

SEQ ID NO: 1049 - protein, 10 aa, synthetic construct
  REGION 1..10: note = Synthetic
TTSRGDTASG

SEQ ID NO: 1050 - protein, 10 aa, synthetic construct
  REGION 1..10: note = Synthetic
AQGRGDPPTI

SEQ ID NO: 1051 - protein, 10 aa, synthetic construct
  REGION 1..10: note = Synthetic
ETHRGDQHDP

SEQ ID NO: 1052 - protein, 10 aa, synthetic construct
  REGION 1..10: note = Synthetic
RTYRGDDSEI

SEQ ID NO: 1053 - protein, 10 aa, synthetic construct
  REGION 1..10: note = Synthetic
ESLRGDLRHS

SEQ ID NO: 1054 - protein, 10 aa, synthetic construct
  REGION 1..10: note = Synthetic
NKLRGDDMTN

SEQ ID NO: 1055 - protein, 10 aa, synthetic construct
  REGION 1..10: note = Synthetic
ESVRGDSMAH

SEQ ID NO: 1056 - protein, 10 aa, synthetic construct
  REGION 1..10: note = Synthetic
QDARGDMTRM

SEQ ID NO: 1057 - protein, 10 aa, synthetic construct
  REGION 1..10: note = Synthetic
QTVRGDIQVT

SEQ ID NO: 1058 - protein, 10 aa, synthetic construct
  REGION 1..10: note = Synthetic
TSRRGDMSKH

SEQ ID NO: 1059 - protein, 10 aa, synthetic construct
  REGION 1..10: note = Synthetic
TAARGDTEVR

SEQ ID NO: 1060 - protein, 10 aa, synthetic construct
  REGION 1..10: note = Synthetic
KSERGDLRNT

SEQ ID NO: 1061 - protein, 10 aa, synthetic construct
  REGION 1..10: note = Synthetic
THPRGDNHIL

SEQ ID NO: 1062 - protein, 10 aa, synthetic construct
  REGION 1..10: note = Synthetic
SGPRGDSNGV

SEQ ID NO: 1063 - protein, 10 aa, synthetic construct
  REGION 1..10: note = Synthetic
QMHRGDQGQV

SEQ ID NO: 1064 - protein, 10 aa, synthetic construct
  REGION 1..10: note = Synthetic
ERGRGDPATL

SEQ ID NO: 1065 - protein, 10 aa, synthetic construct
  REGION 1..10: note = Synthetic
DGVRGDDNKL

SEQ ID NO: 1066 - protein, 10 aa, synthetic construct
  REGION 1..10: note = Synthetic
QLERGDKITL

SEQ ID NO: 1067 - protein, 10 aa, synthetic construct
  REGION 1..10: note = Synthetic
DSYRGDRTNL

SEQ ID NO: 1068 - protein, 10 aa, synthetic construct
  REGION 1..10: note = Synthetic
HWMRGDDTET

SEQ ID NO: 1069 - protein, 10 aa, synthetic construct
  REGION 1..10: note = Synthetic
LPGRGDPSTY

SEQ ID NO: 1070 - protein, 10 aa, synthetic construct
  REGION 1..10: note = Synthetic
LAPRGDYTLT

SEQ ID NO: 1071 - protein, 10 aa, synthetic construct
  REGION 1..10: note = Synthetic
NQMRGDGTHP

SEQ ID NO: 1072 - protein, 10 aa, synthetic construct
  REGION 1..10: note = Synthetic
ATSRGDSLQM

SEQ ID NO: 1073 - protein, 10 aa, synthetic construct
  REGION 1..10: note = Synthetic
NRDRGDTTES

SEQ ID NO: 1074 - protein, 10 aa, synthetic construct
  REGION 1..10: note = Synthetic
IAVRGDQRLT

SEQ ID NO: 1075 - protein, 10 aa, synthetic construct
  REGION 1..10: note = Synthetic
SGDPSQGTYR

SEQ ID NO: 1076 - protein, 10 aa, synthetic construct
  REGION 1..10: note = Synthetic
SREPNQGTPR

SEQ ID NO: 1077 - protein, 10 aa, synthetic construct
  REGION 1..10: note = Synthetic
NVSPTQGTSR

SEQ ID NO: 1078 - protein, 10 aa, synthetic construct
  REGION 1..10: note = Synthetic
AAQPYQGTGR

SEQ ID NO: 1079 - protein, 10 aa, synthetic construct
  REGION 1..10: note = Synthetic
SRDPPQGTTR

SEQ ID NO: 1080 - protein, 10 aa, synthetic construct
  REGION 1..10: note = Synthetic
SSVPKQGTER

SEQ ID NO: 1081 - protein, 10 aa, synthetic construct
  REGION 1..10: note = Synthetic
QASPVQGTTR

SEQ ID NO: 1082 - protein, 10 aa, synthetic construct
  REGION 1..10: note = Synthetic
SERPEQGTQR

SEQ ID NO: 1083 - protein, 10 aa, synthetic construct
  REGION 1..10: note = Synthetic
MTVPNQGTNR

SEQ ID NO: 1084 - protein, 10 aa, synthetic construct
  REGION 1..10: note = Synthetic
SLNPQQGTTR

SEQ ID NO: 1085 - protein, 10 aa, synthetic construct
  REGION 1..10: note = Synthetic
AGTPSQGTLR

SEQ ID NO: 1086 - protein, 10 aa, synthetic construct
  REGION 1..10: note = Synthetic
MEPPHQGTGR

SEQ ID NO: 1087 - protein, 10 aa, synthetic construct
  REGION 1..10: note = Synthetic
TQVPTQGTVR

SEQ ID NO: 1088 - protein, 10 aa, synthetic construct
  REGION 1..10: note = Synthetic
MASPGQGTLR

SEQ ID NO: 1089 - protein, 10 aa, synthetic construct
  REGION 1..10: note = Synthetic
SSLPGQGTMR

SEQ ID NO: 1090 - protein, 10 aa, synthetic construct
  REGION 1..10: note = Synthetic
DAVPKQGTVR

SEQ ID NO: 1091 - protein, 10 aa, synthetic construct
  REGION 1..10: note = Synthetic
MVNPIQGTGR

SEQ ID NO: 1092 - protein, 10 aa, synthetic construct
  REGION 1..10: note = Synthetic
LPRPVQGTDR

SEQ ID NO: 1093 - protein, 10 aa, synthetic construct
  REGION 1..10: note = Synthetic
SESPYQGTLR

SEQ ID NO: 1094 - protein, 10 aa, synthetic construct
  REGION 1..10: note = Synthetic
ESRPNQGTDR

SEQ ID NO: 1095 - protein, 10 aa, synthetic construct
  REGION 1..10: note = Synthetic
SGTPIQGTLR

SEQ ID NO: 1096 - protein, 10 aa, synthetic construct
  REGION 1..10: note = Synthetic
TTSPTQGTSR

SEQ ID NO: 1097 - protein, 10 aa, synthetic construct
  REGION 1..10: note = Synthetic
MEGPSQGTMR

SEQ ID NO: 1098 - protein, 10 aa, synthetic construct
  REGION 1..10: note = Synthetic
NNTPSQGTSR

SEQ ID NO: 1099 - protein, 10 aa, synthetic construct
  REGION 1..10: note = Synthetic
AQEPWQGTGR

SEQ ID NO: 1100 - protein, 10 aa, synthetic construct
  REGION 1..10: note = Synthetic
QNMPLQGTGR

SEQ ID NO: 1101 - protein, 10 aa, synthetic construct
  REGION 1..10: note = Synthetic
AQSPPQGTQR

SEQ ID NO: 1102 - protein, 10 aa, synthetic construct
  REGION 1..10: note = Synthetic
NTNPDQGTMR

SEQ ID NO: 1103 - protein, 10 aa, synthetic construct
  REGION 1..10: note = Synthetic
ETNPRQGTDR

SEQ ID NO: 1104 - protein, 10 aa, synthetic construct
  REGION 1..10: note = Synthetic
EMGPRQGTDR

SEQ ID NO: 1105 - protein, 10 aa, synthetic construct
  REGION 1..10: note = Synthetic
DYSPGQGTVR

SEQ ID NO: 1106 - protein, 10 aa, synthetic construct
  REGION 1..10: note = Synthetic
MLTPHQGTPR

SEQ ID NO: 1107 - protein, 10 aa, synthetic construct
  REGION 1..10: note = Synthetic
AMNPVQGTPR

SEQ ID NO: 1108 - protein, 10 aa, synthetic construct
  REGION 1..10: note = Synthetic
SQMPNQGTAR

SEQ ID NO: 1109 - protein, 10 aa, synthetic construct
  REGION 1..10: note = Synthetic
VAHPSQGTER

SEQ ID NO: 1110 - protein, 10 aa, synthetic construct
  REGION 1..10: note = Synthetic
LANPVQGTAR

SEQ ID NO: 1111 - protein, 10 aa, synthetic construct
  REGION 1..10: note = Synthetic
AIDPKQGTFR

SEQ ID NO: 1112 - protein, 10 aa, synthetic construct
  REGION 1..10: note = Synthetic
EAYPRQGTDR

SEQ ID NO: 1113 - protein, 10 aa, synthetic construct
  REGION 1..10: note = Synthetic
SSSPDQGTTR

SEQ ID NO: 1114 - protein, 10 aa, synthetic construct
  REGION 1..10: note = Synthetic
EGVPIQGTHR

SEQ ID NO: 1115 - protein, 10 aa, synthetic construct
  REGION 1..10: note = Synthetic
TAIPSQGTSR

SEQ ID NO: 1116 - protein, 10 aa, synthetic construct
  REGION 1..10: note = Synthetic
NVNPNQGTDR

SEQ ID NO: 1117 - protein, 10 aa, synthetic construct
  REGION 1..10: note = Synthetic
GVTPAQGTAR

SEQ ID NO: 1118 - protein, 10 aa, synthetic construct
  REGION 1..10: note = Synthetic
TMSPPQGTGR

SEQ ID NO: 1119 - protein, 10 aa, synthetic construct
  REGION 1..10: note = Synthetic
GTVPSQGTSR

SEQ ID NO: 1120 - protein, 10 aa, synthetic construct
  REGION 1..10: note = Synthetic
SEMPSQGTSR

SEQ ID NO: 1121 - protein, 10 aa, synthetic construct
  REGION 1..10: note = Synthetic
TVTPVQGTSR

SEQ ID NO: 1122 - protein, 10 aa, synthetic construct
  REGION 1..10: note = Synthetic
GSTPSQGTMR

SEQ ID NO: 1123 - protein, 10 aa, synthetic construct
  REGION 1..10: note = Synthetic
TKEPGQGTAR

SEQ ID NO: 1124 - protein, 10 aa, synthetic construct
  REGION 1..10: note = Synthetic
AGTPVQGTSR

SEQ ID NO: 1125 - protein, 10 aa, synthetic construct
  REGION 1..10: note = Synthetic
SESPKQGTDR

SEQ ID NO: 1126 - protein, 10 aa, synthetic construct
  REGION 1..10: note = Synthetic
ADNPIQGTGR

SEQ ID NO: 1127 - protein, 10 aa, synthetic construct
  REGION 1..10: note = Synthetic
ERTPVQGTDR

SEQ ID NO: 1128 - protein, 10 aa, synthetic construct
  REGION 1..10: note = Synthetic
KHEPNQGTER

SEQ ID NO: 1129 - protein, 10 aa, synthetic construct
  REGION 1..10: note = Synthetic
TSTPTQGTPR

SEQ ID NO: 1130 - protein, 10 aa, synthetic construct
  REGION 1..10: note = Synthetic
LETPTQGTSR

SEQ ID NO: 1131 - protein, 10 aa, synthetic construct
  REGION 1..10: note = Synthetic
GATPNQGTAR

SEQ ID NO: 1132 - protein, 10 aa, synthetic construct
  REGION 1..10: note = Synthetic
FGSPAQGTGR

SEQ ID NO: 1133 - protein, 10 aa, synthetic construct
  REGION 1..10: note = Synthetic
ASNPMQGTTR

SEQ ID NO: 1134 - protein, 10 aa, synthetic construct
  REGION 1..10: note = Synthetic
SYSPLQGTTR

SEQ ID NO: 1135 - protein, 10 aa, synthetic construct
  REGION 1..10: note = Synthetic
SALPAQGTNR

SEQ ID NO: 1136 - protein, 10 aa, synthetic construct
  REGION 1..10: note = Synthetic
SQTPTQGTVR

SEQ ID NO: 1137 - protein, 10 aa, synthetic construct
  REGION 1..10: note = Synthetic
EGTPAQGTGR

SEQ ID NO: 1138 - protein, 10 aa, synthetic construct
  REGION 1..10: note = Synthetic
TDVPYQGTGR

SEQ ID NO: 1139 - protein, 10 aa, synthetic construct
  REGION 1..10: note = Synthetic
GHEPNQGTAR

SEQ ID NO: 1140 - protein, 10 aa, synthetic construct
  REGION 1..10: note = Synthetic
SSTPGQGTAR

SEQ ID NO: 1141 - protein, 10 aa, synthetic construct
  REGION 1..10: note = Synthetic
TGLPMQGTGR

SEQ ID NO: 1142 - protein, 10 aa, synthetic construct
  REGION 1..10: note = Synthetic
TQVPTQGTVR

SEQ ID NO: 1143 - protein, 10 aa, synthetic construct
  REGION 1..10: note = Synthetic
SDRPYQGTDR

SEQ ID NO: 1144 - protein, 10 aa, synthetic construct
  REGION 1..10: note = Synthetic
VSVPGQGTLR

SEQ ID NO: 1145 - protein, 10 aa, synthetic construct
  REGION 1..10: note = Synthetic
DSGPGQGTTR

SEQ ID NO: 1146 - protein, 10 aa, synthetic construct
  REGION 1..10: note = Synthetic
ATIPVQGTDR

SEQ ID NO: 1147 - protein, 10 aa, synthetic construct
  REGION 1..10: note = Synthetic
MTSPIQGTVR

SEQ ID NO: 1148 - protein, 10 aa, synthetic construct
  REGION 1..10: note = Synthetic
TRDPGQGTNR

SEQ ID NO: 1149 - protein, 10 aa, synthetic construct
  REGION 1..10: note = Synthetic
YPGPEQGTGR

SEQ ID NO: 1150 - protein, 10 aa, synthetic construct
  REGION 1..10: note = Synthetic
SNSPPQGTER

SEQ ID NO: 1151 - protein, 10 aa, synthetic construct
  REGION 1..10: note = Synthetic
GTSPIQGTLR

SEQ ID NO: 1152 - protein, 10 aa, synthetic construct
  REGION 1..10: note = Synthetic
MVSPTQGTSR

SEQ ID NO: 1153 - protein, 10 aa, synthetic construct
  REGION 1..10: note = Synthetic
MEGPHQGTGR

SEQ ID NO: 1154 - protein, 10 aa, synthetic construct
  REGION 1..10: note = Synthetic
IEGPTQGTSR

SEQ ID NO: 1155 - protein, 10 aa, synthetic construct
  REGION 1..10: note = Synthetic
SKEPVQGTSR

SEQ ID NO: 1156 - protein, 10 aa, synthetic construct
  REGION 1..10: note = Synthetic
TMGPNQGTTR

SEQ ID NO: 1157 - protein, 10 aa, synthetic construct
  REGION 1..10: note = Synthetic
QNYPTQGTTR

SEQ ID NO: 1158 - protein, 10 aa, synthetic construct
  REGION 1..10: note = Synthetic
SESPVQGTVR

SEQ ID NO: 1159 - protein, 10 aa, synthetic construct
  REGION 1..10: note = Synthetic
SYAPSQGTAR

SEQ ID NO: 1160 - protein, 10 aa, synthetic construct
  REGION 1..10: note = Synthetic
TSQPTQGTGR

SEQ ID NO: 1161 - protein, 10 aa, synthetic construct
  REGION 1..10: note = Synthetic
QIRPSQGTDR

SEQ ID NO: 1162 - protein, 10 aa, synthetic construct
  REGION 1..10: note = Synthetic
DGSPNQGTGR

SEQ ID NO: 1163 - protein, 10 aa, synthetic construct
  REGION 1..10: note = Synthetic
SGEPNQGTLR

SEQ ID NO: 1164 - protein, 10 aa, synthetic construct
  REGION 1..10: note = Synthetic
ASLPVQGTSR

SEQ ID NO: 1165 - protein, 10 aa, synthetic construct
  REGION 1..10: note = Synthetic
VVNPTQGTIR

SEQ ID NO: 1166 - protein, 10 aa, synthetic construct
  REGION 1..10: note = Synthetic
EDLPRQGTGR

SEQ ID NO: 1167 - protein, 10 aa, synthetic construct
  REGION 1..10: note = Synthetic
SFLPNQGTAR

SEQ ID NO: 1168 - protein, 10 aa, synthetic construct
  REGION 1..10: note = Synthetic
KGTPSQGTER

SEQ ID NO: 1169 - protein, 10 aa, synthetic construct
  REGION 1..10: note = Synthetic
SFTPVQGTSR

SEQ ID NO: 1170 - protein, 10 aa, synthetic construct
  REGION 1..10: note = Synthetic
GVLPQQGTPR

SEQ ID NO: 1171 - protein, 10 aa, synthetic construct
  REGION 1..10: note = Synthetic
NSPPPQGTNR

SEQ ID NO: 1172 - protein, 10 aa, synthetic construct
  REGION 1..10: note = Synthetic
AREPVQGTVR

SEQ ID NO: 1173 - protein, 10 aa, synthetic construct
  REGION 1..10: note = Synthetic
GTTPMQGTSR

SEQ ID NO: 1174 - protein, 10 aa, synthetic construct
  REGION 1..10: note = Synthetic
TLLRGDHSLT

SEQ ID NO: 1175 - protein, 10 aa, synthetic construct
  REGION 1..10: note = Synthetic
TSTRGDVENR

SEQ ID NO: 1176 - protein, 10 aa, synthetic construct
  REGION 1..10: note = Synthetic
NVSRGDVTRN

SEQ ID NO: 1177 - protein, 10 aa, synthetic construct
  REGION 1..10: note = Synthetic
KYERGDVIQL

SEQ ID NO: 1178 - protein, 10 aa, synthetic construct
  REGION 1..10: note = Synthetic
LTVRGDQSFQ

SEQ ID NO: 1179 - protein, 10 aa, synthetic construct
  REGION 1..10: note = Synthetic
SALRGDGPLP

SEQ ID NO: 1180 - protein, 10 aa, synthetic construct
  REGION 1..10: note = Synthetic
NVIRGDNSTT

SEQ ID NO: 1181 - protein, 10 aa, synthetic construct
  REGION 1..10: note = Synthetic
SSNRGDVLTS

SEQ ID NO: 1182 - protein, 10 aa, synthetic construct
  REGION 1..10: note = Synthetic
MHNRGDNQYT

SEQ ID NO: 1183 - protein, 10 aa, synthetic construct
  REGION 1..10: note = Synthetic
NTSRGDSSST

SEQ ID NO: 1184 - protein, 10 aa, synthetic construct
  REGION 1..10: note = Synthetic
SNFRGDSSVT

SEQ ID NO: 1185 - protein, 10 aa, synthetic construct
  REGION 1..10: note = Synthetic
ATNRGDGRNL

SEQ ID NO: 1186 - protein, 10 aa, synthetic construct
  REGION 1..10: note = Synthetic
NHGRGDPATL

SEQ ID NO: 1187 - protein, 10 aa, synthetic construct
  REGION 1..10: note = Synthetic
TRERGDGNQE

SEQ ID NO: 1188 - protein, 10 aa, synthetic construct
  REGION 1..10: note = Synthetic
TSDRGDTKPL

SEQ ID NO: 1189 - protein, 10 aa, synthetic construct
  REGION 1..10: note = Synthetic
LTERGDRDRA

SEQ ID NO: 1190 - protein, 10 aa, synthetic construct
  REGION 1..10: note = Synthetic
ERSRGDSSTT

SEQ ID NO: 1191 - protein, 10 aa, synthetic construct
  REGION 1..10: note = Synthetic
GYNRGDDPPS

SEQ ID NO: 1192 - protein, 10 aa, synthetic construct
  REGION 1..10: note = Synthetic
QSTRGDVLTS

SEQ ID NO: 1193 - protein, 10 aa, synthetic construct
  REGION 1..10: note = Synthetic
NTTRGDQNPI

SEQ ID NO: 1194 - protein, 10 aa, synthetic construct
  REGION 1..10: note = Synthetic
TNGRGDLTGT

SEQ ID NO: 1195 - protein, 10 aa, synthetic construct
  REGION 1..10: note = Synthetic
SNQRGDSTRL

SEQ ID NO: 1196 - protein, 10 aa, synthetic construct
  REGION 1..10: note = Synthetic
YRARGDGAID

SEQ ID NO: 1197 - protein, 10 aa, synthetic construct
  REGION 1..10: note = Synthetic
QTLRGDNTPT

SEQ ID NO: 1198 - protein, 10 aa, synthetic construct
  REGION 1..10: note = Synthetic
ELGRGDQHAR

SEQ ID NO: 1199 - protein, 10 aa, synthetic construct
  REGION 1..10: note = Synthetic
SSFRGDNSER

SEQ ID NO: 1200 - protein, 10 aa, synthetic construct
  REGION 1..10: note = Synthetic
THVRGDIVHN

SEQ ID NO: 1201 - protein, 10 aa, synthetic construct
  REGION 1..10: note = Synthetic
VWQRGDITMN

SEQ ID NO: 1202 - protein, 10 aa, synthetic construct
  REGION 1..10: note = Synthetic
TANRGDNTVT

SEQ ID NO: 1203 - protein, 10 aa, synthetic construct
  REGION 1..10: note = Synthetic
ASVRGDSAMT

SEQ ID NO: 1204 - protein, 10 aa, synthetic construct
  REGION 1..10: note = Synthetic
ESLRGDISTT

SEQ ID NO: 1205 - protein, 10 aa, synthetic construct
  REGION 1..10: note = Synthetic
TSSRGDSTSV

SEQ ID NO: 1206 - protein, 10 aa, synthetic construct
  REGION 1..10: note = Synthetic
LPTRGDTATT

SEQ ID NO: 1207 - protein, 10 aa, synthetic construct
  REGION 1..10: note = Synthetic
MRDRGDTALE

SEQ ID NO: 1208 - protein, 10 aa, synthetic construct
  REGION 1..10: note = Synthetic
DKPRGDFGTS

SEQ ID NO: 1209 - protein, 10 aa, synthetic construct
  REGION 1..10: note = Synthetic
SRLRGDELNS

SEQ ID NO: 1210 - protein, 10 aa, synthetic construct
  REGION 1..10: note = Synthetic
TNLRGDGKHT

SEQ ID NO: 1211 - protein, 10 aa, synthetic construct
  REGION 1..10: note = Synthetic
LQGRGDPQVA

SEQ ID NO: 1212 - protein, 10 aa, synthetic construct
  REGION 1..10: note = Synthetic
SVPRGDSAGL

SEQ ID NO: 1213 - protein, 10 aa, synthetic construct
  REGION 1..10: note = Synthetic
SELRGDYPVN

SEQ ID NO: 1214 - protein, 10 aa, synthetic construct
  REGION 1..10: note = Synthetic
GGLRGDASNP

SEQ ID NO: 1215 - protein, 10 aa, synthetic construct
  REGION 1..10: note = Synthetic
DLNRGDVQRP

SEQ ID NO: 1216 - protein, 10 aa, synthetic construct
  REGION 1..10: note = Synthetic
EQQRGDKAIT

SEQ ID NO: 1217 - protein, 10 aa, synthetic construct
  REGION 1..10: note = Synthetic
RTFRGDPNVQ

SEQ ID NO: 1218 - protein, 10 aa, synthetic construct
  REGION 1..10: note = Synthetic
RATRGDSAET

SEQ ID NO: 1219 - protein, 10 aa, synthetic construct
  REGION 1..10: note = Synthetic
SYYRGDPQST

SEQ ID NO: 1220 - protein, 10 aa, synthetic construct
  REGION 1..10: note = Synthetic
RTVRGDVSNP

SEQ ID NO: 1221 - protein, 10 aa, synthetic construct
  REGION 1..10: note = Synthetic
SNNRGDGSFT

SEQ ID NO: 1222 - protein, 10 aa, synthetic construct
  REGION 1..10: note = Synthetic
TGGRGDAHEW

SEQ ID NO: 1223 - protein, 10 aa, synthetic construct
  REGION 1..10: note = Synthetic
MQTRGDPKML

SEQ ID NO: 1224 - protein, 10 aa, synthetic construct
  REGION 1..10: note = Synthetic
LGIRGDPHTT

SEQ ID NO: 1225 - protein, 10 aa, synthetic construct
  REGION 1..10: note = Synthetic
QLGRGDTNER

SEQ ID NO: 1226 - protein, 10 aa, synthetic construct
  REGION 1..10: note = Synthetic
AVIRGDNVML

SEQ ID NO: 1227 - protein, 10 aa, synthetic construct
  REGION 1..10: note = Synthetic
VDRRGDVSAE

SEQ ID NO: 1228 - protein, 10 aa, synthetic construct
  REGION 1..10: note = Synthetic
VTLRGDKNST

SEQ ID NO: 1229 - protein, 10 aa, synthetic construct
  REGION 1..10: note = Synthetic
SMLRGDTRIS

SEQ ID NO: 1230 - protein, 10 aa, synthetic construct
  REGION 1..10: note = Synthetic
WTHRGDPSER

SEQ ID NO: 1231 - protein, 10 aa, synthetic construct
  REGION 1..10: note = Synthetic
LAVRGDVSHG

SEQ ID NO: 1232 - protein, 10 aa, synthetic construct
  REGION 1..10: note = Synthetic
MWLRGDSTVS

SEQ ID NO: 1233 - protein, 10 aa, synthetic construct
  REGION 1..10: note = Synthetic
SVKRGDGEPF

SEQ ID NO: 1234 - protein, 10 aa, synthetic construct
  REGION 1..10: note = Synthetic
TGRRGDNLEL

SEQ ID NO: 1235 - protein, 10 aa, synthetic construct
  REGION 1..10: note = Synthetic
TYMRGDTNQQ

SEQ ID NO: 1236 - protein, 10 aa, synthetic construct
  REGION 1..10: note = Synthetic
SNVRGDTLTT

SEQ ID NO: 1237 - protein, 10 aa, synthetic construct
  REGION 1..10: note = Synthetic
TWTRGDDAKL

SEQ ID NO: 1238 - protein, 10 aa, synthetic construct
  REGION 1..10: note = Synthetic
MSIRGDSQAQ

SEQ ID NO: 1239 - protein, 10 aa, synthetic construct
  REGION 1..10: note = Synthetic
LFTRGDSMVT

SEQ ID NO: 1240 - protein, 10 aa, synthetic construct
  REGION 1..10: note = Synthetic
YKERGDPLAP

SEQ ID NO: 1241 - protein, 10 aa, synthetic construct
  REGION 1..10: note = Synthetic
TPVRGDVTPS

SEQ ID NO: 1242 - protein, 10 aa, synthetic construct
  REGION 1..10: note = Synthetic
EVVRGDPSNY

SEQ ID NO: 1243 - protein, 10 aa, synthetic construct
  REGION 1..10: note = Synthetic
DTKRGDVAPR

SEQ ID NO: 1244 - protein, 10 aa, synthetic construct
  REGION 1..10: note = Synthetic
ITYRGDNSTL

SEQ ID NO: 1245 - protein, 10 aa, synthetic construct
  REGION 1..10: note = Synthetic
LNGRGDNLYE

SEQ ID NO: 1246 - protein, 10 aa, synthetic construct
  REGION 1..10: note = Synthetic
CTERGDQVSN

SEQ ID NO: 1247 - protein, 10 aa, synthetic construct
  REGION 1..10: note = Synthetic
TMHRGDNNRV

SEQ ID NO: 1248 - protein, 10 aa, synthetic construct
  REGION 1..10: note = Synthetic
TRDRGDNLTE

SEQ ID NO: 1249 - protein, 10 aa, synthetic construct
  REGION 1..10: note = Synthetic
YVLRGDSSSH

SEQ ID NO: 1250 - protein, 10 aa, synthetic construct
  REGION 1..10: note = Synthetic
GPTRGDSVLT

SEQ ID NO: 1251 - protein, 10 aa, synthetic construct
  REGION 1..10: note = Synthetic
TWMRGDDTHS

SEQ ID NO: 1252 - protein, 10 aa, synthetic construct
  REGION 1..10: note = Synthetic
TGTRGDTDII

SEQ ID NO: 1253 - protein, 10 aa, synthetic construct
  REGION 1..10: note = Synthetic
TNARGDGFQG

SEQ ID NO: 1254 - protein, 10 aa, synthetic construct
  REGION 1..10: note = Synthetic
TTHRGDPLPA

SEQ ID NO: 1255 - protein, 10 aa, synthetic construct
  REGION 1..10: note = Synthetic
SLGRGDRSEG

SEQ ID NO: 1256 - protein, 10 aa, synthetic construct
  REGION 1..10: note = Synthetic
ELSRGDTVTV

SEQ ID NO: 1257 - protein, 10 aa, synthetic construct
  REGION 1..10: note = Synthetic
GTLRGDNSPL

SEQ ID NO: 1258 - protein, 10 aa, synthetic construct
  REGION 1..10: note = Synthetic
MALRGDGVSG

SEQ ID NO: 1259 - protein, 10 aa, synthetic construct
  REGION 1..10: note = Synthetic
NAYRGDKTQA

SEQ ID NO: 1260 - protein, 10 aa, synthetic construct
  REGION 1..10: note = Synthetic
GAARGDGAGA

SEQ ID NO: 1261 - protein, 10 aa, synthetic construct
  REGION 1..10: note = Synthetic
TSWRGDSRDL

SEQ ID NO: 1262 - protein, 10 aa, synthetic construct
  REGION 1..10: note = Synthetic
VTLRGDNSRE

SEQ ID NO: 1263 - protein, 10 aa, synthetic construct
  REGION 1..10: note = Synthetic
VTERGDDRAL

SEQ ID NO: 1264 - protein, 10 aa, synthetic construct
  REGION 1..10: note = Synthetic
TSTRGDTLMT

SEQ ID NO: 1265 - protein, 10 aa, synthetic construct
  REGION 1..10: note = Synthetic
TDARGDAGQA

SEQ ID NO: 1266 - protein, 10 aa, synthetic construct
  REGION 1..10: note = Synthetic
TRDRGDHAPT

SEQ ID NO: 1267 - protein, 10 aa, synthetic construct
  REGION 1..10: note = Synthetic
SGTRGDTVDA

SEQ ID NO: 1268 - protein, 10 aa, synthetic construct
  REGION 1..10: note = Synthetic
SGNRGDSAST

SEQ ID NO: 1269 - protein, 10 aa, synthetic construct
  REGION 1..10: note = Synthetic
SSMRGDDSHY

SEQ ID NO: 1270 - protein, 10 aa, synthetic construct
  REGION 1..10: note = Synthetic
EGARGDKQAT

SEQ ID NO: 1271 - protein, 10 aa, synthetic construct
  REGION 1..10: note = Synthetic
LSSRGDLQER

SEQ ID NO: 1272 - protein, 10 aa, synthetic construct
  REGION 1..10: note = Synthetic
QLERGDNSSS

SEQ ID NO: 1273 - protein, 10 aa, synthetic construct
  REGION 1..10: note = Synthetic
VVARGDVVAL

SEQ ID NO: 1274 - protein, 10 aa, synthetic construct
  REGION 1..10: note = Synthetic
RQTRGDTTSA

SEQ ID NO: 1275 - protein, 10 aa, synthetic construct
  REGION 1..10: note = Synthetic
TTSRGDTASG

SEQ ID NO: 1276 - protein, 10 aa, synthetic construct
  REGION 1..10: note = Synthetic
AQGRGDPPTI

SEQ ID NO: 1277 - protein, 10 aa, synthetic construct
  REGION 1..10: note = Synthetic
ETHRGDQHDP

SEQ ID NO: 1278 - protein, 10 aa, synthetic construct
  REGION 1..10: note = Synthetic
RTYRGDDSEI

SEQ ID NO: 1279 - protein, 10 aa, synthetic construct
  REGION 1..10: note = Synthetic
ESLRGDLRHS

SEQ ID NO: 1280 - protein, 10 aa, synthetic construct
  REGION 1..10: note = Synthetic
NKLRGDDMTN

SEQ ID NO: 1281 - protein, 10 aa, synthetic construct
  REGION 1..10: note = Synthetic
ESVRGDSMAH

SEQ ID NO: 1282 - protein, 10 aa, synthetic construct
  REGION 1..10: note = Synthetic
QDARGDMTRM

SEQ ID NO: 1283 - protein, 10 aa, synthetic construct
  REGION 1..10: note = Synthetic
QTVRGDIQVT

SEQ ID NO: 1284 - protein, 10 aa, synthetic construct
  REGION 1..10: note = Synthetic
TSRRGDMSKH

SEQ ID NO: 1285 - protein, 10 aa, synthetic construct
  REGION 1..10: note = Synthetic
TAARGDTEVR

SEQ ID NO: 1286 - protein, 10 aa, synthetic construct
  REGION 1..10: note = Synthetic
KSERGDLRNT

SEQ ID NO: 1287 - protein, 10 aa, synthetic construct
  REGION 1..10: note = Synthetic
THPRGDNHIL

SEQ ID NO: 1288 - protein, 10 aa, synthetic construct
  REGION 1..10: note = Synthetic
SGPRGDSNGV

SEQ ID NO: 1289 - protein, 10 aa, synthetic construct
  REGION 1..10: note = Synthetic
QMHRGDQGQV

SEQ ID NO: 1290 - protein, 10 aa, synthetic construct
  REGION 1..10: note = Synthetic
ERGRGDPATL

SEQ ID NO: 1291 - protein, 10 aa, synthetic construct
  REGION 1..10: note = Synthetic
DGVRGDDNKL

SEQ ID NO: 1292 - protein, 10 aa, synthetic construct
  REGION 1..10: note = Synthetic
QLERGDKITL

SEQ ID NO: 1293 - protein, 10 aa, synthetic construct
  REGION 1..10: note = Synthetic
DSYRGDRTNL

SEQ ID NO: 1294 - protein, 10 aa, synthetic construct
  REGION 1..10: note = Synthetic
HWMRGDDTET

SEQ ID NO: 1295 - protein, 10 aa, synthetic construct
  REGION 1..10: note = Synthetic
LPGRGDPSTY

SEQ ID NO: 1296 - protein, 10 aa, synthetic construct
  REGION 1..10: note = Synthetic
LAPRGDYTLT

SEQ ID NO: 1297 - protein, 10 aa, synthetic construct
  REGION 1..10: note = Synthetic
NQMRGDGTHP

SEQ ID NO: 1298 - protein, 10 aa, synthetic construct
  REGION 1..10: note = Synthetic
ATSRGDSLQM

SEQ ID NO: 1299 - protein, 10 aa, synthetic construct
  REGION 1..10: note = Synthetic
NRDRGDTTES

SEQ ID NO: 1300 - protein, 10 aa, synthetic construct
  REGION 1..10: note = Synthetic
IAVRGDQRLT

SEQ ID NO: 1301 - protein, 10 aa, synthetic construct
  REGION 1..10: note = Synthetic
EGAPSQGTYR

SEQ ID NO: 1302 - protein, 10 aa, synthetic construct
  REGION 1..10: note = Synthetic
TASPSQGTTR

SEQ ID NO: 1303 - protein, 10 aa, synthetic construct
  REGION 1..10: note = Synthetic
GTEPKQGTLR

SEQ ID NO: 1304 - protein, 10 aa, synthetic construct
  REGION 1..10: note = Synthetic
NAGPSQGTSR

SEQ ID NO: 1305 - protein, 10 aa, synthetic construct
  REGION 1..10: note = Synthetic
MATPTQGTSR

SEQ ID NO: 1306 - protein, 10 aa, synthetic construct
  REGION 1..10: note = Synthetic
NGTPEQGTTR

SEQ ID NO: 1307 - protein, 10 aa, synthetic construct
  REGION 1..10: note = Synthetic
GTVPYQGTGR

SEQ ID NO: 1308 - protein, 10 aa, synthetic construct
  REGION 1..10: note = Synthetic
GGNPVQGTAR

SEQ ID NO: 1309 - protein, 10 aa, synthetic construct
  REGION 1..10: note = Synthetic
NSGPGQGTMR

SEQ ID NO: 1310 - protein, 10 aa, synthetic construct
  REGION 1..10: note = Synthetic
AHAPLQGTAR

SEQ ID NO: 1311 - protein, 10 aa, synthetic construct
  REGION 1..10: note = Synthetic
GVLPGQGTGR

SEQ ID NO: 1312 - protein, 10 aa, synthetic construct
  REGION 1..10: note = Synthetic
MMHPVQGTER

SEQ ID NO: 1313 - protein, 10 aa, synthetic construct
  REGION 1..10: note = Synthetic
MNGPQQGTLR

SEQ ID NO: 1314 - protein, 10 aa, synthetic construct
  REGION 1..10: note = Synthetic
TMLPVQGTGR

SEQ ID NO: 1315 - protein, 10 aa, synthetic construct
  REGION 1..10: note = Synthetic
LEHPTQGTGR

SEQ ID NO: 1316 - protein, 10 aa, synthetic construct
  REGION 1..10: note = Synthetic
TYNPTQGTVR

SEQ ID NO: 1317 - protein, 10 aa, synthetic construct
  REGION 1..10: note = Synthetic
GSLPSQGTIR

SEQ ID NO: 1318 - protein, 10 aa, synthetic construct
  REGION 1..10: note = Synthetic
EATPSQGTMR

SEQ ID NO: 1319 - protein, 10 aa, synthetic construct
  REGION 1..10: note = Synthetic
CANPVQGTNR

SEQ ID NO: 1320 - protein, 10 aa, synthetic construct
  REGION 1..10: note = Synthetic
SSGPNQGTVR

SEQ ID NO: 1321 - protein, 10 aa, synthetic construct
  REGION 1..10: note = Synthetic
GQKPDQGTVR

SEQ ID NO: 1322 - protein, 10 aa, synthetic construct
  REGION 1..10: note = Synthetic
MQVPTQGTSR

SEQ ID NO: 1323 - protein, 10 aa, synthetic construct
  REGION 1..10: note = Synthetic
GSLPIQGTSR

SEQ ID NO: 1324 - protein, 10 aa, synthetic construct
  REGION 1..10: note = Synthetic
WLGPGQGTER

SEQ ID NO: 1325 - protein, 10 aa, synthetic construct
  REGION 1..10: note = Synthetic
EQNPKQGTER

SEQ ID NO: 1326 - protein, 10 aa, synthetic construct
  REGION 1..10: note = Synthetic
DGSPVQGTGR

SEQ ID NO: 1327 - protein, 10 aa, synthetic construct
  REGION 1..10: note = Synthetic
SMHPTQGTAR

SEQ ID NO: 1328 - protein, 10 aa, synthetic construct
  REGION 1..10: note = Synthetic
SGQPWQGTDR

SEQ ID NO: 1329 - protein, 10 aa, synthetic construct
  REGION 1..10: note = Synthetic
EPGPPQGTNR

SEQ ID NO: 1330 - protein, 10 aa, synthetic construct
  REGION 1..10: note = Synthetic
SMDPAQGTQR

SEQ ID NO: 1331 - protein, 10 aa, synthetic construct
  REGION 1..10: note = Synthetic
GTNPGQGTIR

SEQ ID NO: 1332 - protein, 10 aa, synthetic construct
  REGION 1..10: note = Synthetic
TNVPSQGTMR

SEQ ID NO: 1333 - protein, 10 aa, synthetic construct
  REGION 1..10: note = Synthetic
IEKPSQGTER

SEQ ID NO: 1334 - protein, 10 aa, synthetic construct
  REGION 1..10: note = Synthetic
YEGPSQGTGR

SEQ ID NO: 1335 - protein, 10 aa, synthetic construct
  REGION 1..10: note = Synthetic
TPYPNQGTER

SEQ ID NO: 1336 - protein, 10 aa, synthetic construct
  REGION 1..10: note = Synthetic
TREPFQGTGR

SEQ ID NO: 1337 - protein, 10 aa, synthetic construct
  REGION 1..10: note = Synthetic
GTVPTQGTGR

SEQ ID NO: 1338 - protein, 10 aa, synthetic construct
  REGION 1..10: note = Synthetic
GSDPSQGTMR

SEQ ID NO: 1339 - protein, 10 aa, synthetic construct
  REGION 1..10: note = Synthetic
SFQPPQGTNR

SEQ ID NO: 1340 - protein, 10 aa, synthetic construct
  REGION 1..10: note = Synthetic
YATPSQGTVR

SEQ ID NO: 1341 - protein, 10 aa, synthetic construct
  REGION 1..10: note = Synthetic
GTGPHQGTLR

SEQ ID NO: 1342 - protein, 10 aa, synthetic construct
  REGION 1..10: note = Synthetic
ATQPDQGTGR

SEQ ID NO: 1343 - protein, 10 aa, synthetic construct
  REGION 1..10: note = Synthetic
NGFPIQGTER

SEQ ID NO: 1344 - protein, 10 aa, synthetic construct
  REGION 1..10: note = Synthetic
LGSPSQGTTR

SEQ ID NO: 1345 - protein, 10 aa, synthetic construct
  REGION 1..10: note = Synthetic
TEMPVQGTVR

SEQ ID NO: 1346 - protein, 10 aa, synthetic construct
  REGION 1..10: note = Synthetic
SNSPPQGTER

SEQ ID NO: 1347 - protein, 10 aa, synthetic construct
  REGION 1..10: note = Synthetic
GTMPQQGTGR

SEQ ID NO: 1348 - protein, 10 aa, synthetic construct
  REGION 1..10: note = Synthetic
MEHPTQGTGR

SEQ ID NO: 1349 - protein, 10 aa, synthetic construct
  REGION 1..10: note = Synthetic
MSGPSQGTNR

SEQ ID NO: 1350 - protein, 10 aa, synthetic construct
  REGION 1..10: note = Synthetic
SMLPHQGTSR

SEQ ID NO: 1351 - protein, 10 aa, synthetic construct
  REGION 1..10: note = Synthetic
VRDPNQGTSR

SEQ ID NO: 1352 - protein, 10 aa, synthetic construct
  REGION 1..10: note = Synthetic
LQAPSQGTAR

SEQ ID NO: 1353 - protein, 10 aa, synthetic construct
  REGION 1..10: note = Synthetic
GMEPPQGTVR

SEQ ID NO: 1354 - protein, 10 aa, synthetic construct
  REGION 1..10: note = Synthetic
VTTPLQGTDR

SEQ ID NO: 1355 - protein, 10 aa, synthetic construct
  REGION 1..10: note = Synthetic
MAAPVQGTPR

SEQ ID NO: 1356 - protein, 10 aa, synthetic construct
  REGION 1..10: note = Synthetic
STEPDQGTKR

SEQ ID NO: 1357 - protein, 10 aa, synthetic construct
  REGION 1..10: note = Synthetic
VGTPEQGTAR

SEQ ID NO: 1358 - protein, 10 aa, synthetic construct
  REGION 1..10: note = Synthetic
AGSPTQGTLR

SEQ ID NO: 1359 - protein, 10 aa, synthetic construct
  REGION 1..10: note = Synthetic
GNTPSQGTVR

SEQ ID NO: 1360 - protein, 10 aa, synthetic construct
  REGION 1..10: note = Synthetic
GGAPVQGTSR

SEQ ID NO: 1361 - protein, 10 aa, synthetic construct
  REGION 1..10: note = Synthetic
QGLPTQGTPR

SEQ ID NO: 1362 - protein, 10 aa, synthetic construct
  REGION 1..10: note = Synthetic
TTSPSQGTAR

SEQ ID NO: 1363 - protein, 10 aa, synthetic construct
  REGION 1..10: note = Synthetic
NHTPAQGTQR

SEQ ID NO: 1364 - protein, 10 aa, synthetic construct
  REGION 1..10: note = Synthetic
YTSPVQGTVR

SEQ ID NO: 1365 - protein, 10 aa, synthetic construct
  REGION 1..10: note = Synthetic
SGEPVQGTVR

SEQ ID NO: 1366 - protein, 10 aa, synthetic construct
  REGION 1..10: note = Synthetic
EGNPAQGTVR

SEQ ID NO: 1367 - protein, 10 aa, synthetic construct
  REGION 1..10: note = Synthetic
SSEPNQGTPR

SEQ ID NO: 1368 - protein, 10 aa, synthetic construct
  REGION 1..10: note = Synthetic
GAIPNQGTTR

SEQ ID NO: 1369 - protein, 10 aa, synthetic construct
  REGION 1..10: note = Synthetic
MAHPVQGTER

SEQ ID NO: 1370 - protein, 10 aa, synthetic construct
  REGION 1..10: note = Synthetic
VLHPVQGTDR

SEQ ID NO: 1371 - protein, 10 aa, synthetic construct
  REGION 1..10: note = Synthetic
AQDPSQGTSR

SEQ ID NO: 1372 - protein, 10 aa, synthetic construct
  REGION 1..10: note = Synthetic
LVDPIQGTIR

SEQ ID NO: 1373 - protein, 10 aa, synthetic construct
  REGION 1..10: note = Synthetic
ARDPMQGTGR

SEQ ID NO: 1374 - protein, 10 aa, synthetic construct
  REGION 1..10: note = Synthetic
SVTPVQGTLR

SEQ ID NO: 1375 - protein, 10 aa, synthetic construct
  REGION 1..10: note = Synthetic
AVTPAQGTLR

SEQ ID NO: 1376 - protein, 10 aa, synthetic construct
  REGION 1..10: note = Synthetic
MANPSQGTVR

SEQ ID NO: 1377 - protein, 10 aa, synthetic construct
  REGION 1..10: note = Synthetic
GSIPSQGTSR

SEQ ID NO: 1378 - protein, 10 aa, synthetic construct
  REGION 1..10: note = Synthetic
MGVPEQGTTR

SEQ ID NO: 1379 - protein, 10 aa, synthetic construct
  REGION 1..10: note = Synthetic
EGSPYQGTDR

SEQ ID NO: 1380 - protein, 10 aa, synthetic construct
  REGION 1..10: note = Synthetic
MGYPMQGTGR

SEQ ID NO: 1381 - protein, 10 aa, synthetic construct
  REGION 1..10: note = Synthetic
SWTPNQGTNR

SEQ ID NO: 1382 - protein, 10 aa, synthetic construct
  REGION 1..10: note = Synthetic
GNGPSQGTTR

SEQ ID NO: 1383 - protein, 10 aa, synthetic construct
  REGION 1..10: note = Synthetic
SEVPIQGTVR

SEQ ID NO: 1384 - protein, 10 aa, synthetic construct
  REGION 1..10: note = Synthetic
GQLPSQGTGR

SEQ ID NO: 1385 - protein, 10 aa, synthetic construct
  REGION 1..10: note = Synthetic
GHNPDQGTVR

SEQ ID NO: 1386 - protein, 10 aa, synthetic construct
  REGION 1..10: note = Synthetic
ETGPPQGTMR

SEQ ID NO: 1387 - protein, 10 aa, synthetic construct
  REGION 1..10: note = Synthetic
SALPDQGTAR

SEQ ID NO: 1388 - protein, 10 aa, synthetic construct
  REGION 1..10: note = Synthetic
MSSPPQGTAR

SEQ ID NO: 1389 - protein, 10 aa, synthetic construct
  REGION 1..10: note = Synthetic
SISPTQGTGR

SEQ ID NO: 1390 - protein, 10 aa, synthetic construct
  REGION 1..10: note = Synthetic
VSAPSQGTQR

SEQ ID NO: 1391 - protein, 10 aa, synthetic construct
  REGION 1..10: note = Synthetic
QMMPSQGTVR

SEQ ID NO: 1392 - protein, 10 aa, synthetic construct
  REGION 1..10: note = Synthetic
LASPPQGTSR

SEQ ID NO: 1393 - protein, 10 aa, synthetic construct
  REGION 1..10: note = Synthetic
SSDPKQGTPR

SEQ ID NO: 1394 - protein, 10 aa, synthetic construct
  REGION 1..10: note = Synthetic
ESEPRQGTTR

SEQ ID NO: 1395 - protein, 10 aa, synthetic construct
  REGION 1..10: note = Synthetic
NAGPDQGTVR

SEQ ID NO: 1396 - protein, 10 aa, synthetic construct
  REGION 1..10: note = Synthetic
MASPIQGTTR

SEQ ID NO: 1397 - protein, 10 aa, synthetic construct
  REGION 1..10: note = Synthetic
GPLPVQGTMR

SEQ ID NO: 1398 - protein, 10 aa, synthetic construct
  REGION 1..10: note = Synthetic
NSLPKQGTDR

SEQ ID NO: 1399 - protein, 10 aa, synthetic construct
  REGION 1..10: note = Synthetic
GSMPAQGTNR

SEQ ID NO: 1400 - protein, 10 aa, synthetic construct
  REGION 1..10: note = Synthetic
SAGPLQGTAR

SEQ ID NO: 1401 - protein, 10 aa, synthetic construct
  REGION 1..10: note = Synthetic
SGPPEQGTNR

SEQ ID NO: 1402 - protein, 10 aa, synthetic construct
  REGION 1..10: note = Synthetic
GTSPIQGTLR

SEQ ID NO: 1403 - protein, 10 aa, synthetic construct
  REGION 1..10: note = Synthetic
AMQPVQGTAR

SEQ ID NO: 1404 - protein, 10 aa, synthetic construct
  REGION 1..10: note = Synthetic
YTSPIQGTNR

SEQ ID NO: 1405 - protein, 10 aa, synthetic construct
  REGION 1..10: note = Synthetic
ANSPVQGTVR

SEQ ID NO: 1406 - protein, 10 aa, synthetic construct
  REGION 1..10: note = Synthetic
SPVPKQGTER

SEQ ID NO: 1407 - protein, 10 aa, synthetic construct
  REGION 1..10: note = Synthetic
AESPVQGTGR

SEQ ID NO: 1408 - protein, 10 aa, synthetic construct
  REGION 1..10: note = Synthetic
SMHPTQGTAR

SEQ ID NO: 1409 - protein, 10 aa, synthetic construct
  REGION 1..10: note = Synthetic
MSGPEQGTLR

SEQ ID NO: 1410 - protein, 10 aa, synthetic construct
  REGION 1..10: note = Synthetic
AQAPEQGTIR

SEQ ID NO: 1411 - protein, 10 aa, synthetic construct
  REGION 1..10: note = Synthetic
RLQPVQGTDR

SEQ ID NO: 1412 - protein, 10 aa, synthetic construct
  REGION 1..10: note = Synthetic
TSVPSQGTER

SEQ ID NO: 1413 - protein, 10 aa, synthetic construct
  REGION 1..10: note = Synthetic
AAVPVQGTPR

SEQ ID NO: 1414 - protein, 10 aa, synthetic construct
  REGION 1..10: note = Synthetic
GMAPGQGTAR

SEQ ID NO: 1415 - protein, 10 aa, synthetic construct
  REGION 1..10: note = Synthetic
GMMPAQGTNR

SEQ ID NO: 1416 - protein, 10 aa, synthetic construct
  REGION 1..10: note = Synthetic
SEHPSQGTMR

SEQ ID NO: 1417 - protein, 10 aa, synthetic construct
  REGION 1..10: note = Synthetic
SYAPSQGTAR

SEQ ID NO: 1418 - protein, 10 aa, synthetic construct
  REGION 1..10: note = Synthetic
SWSPIQGTSR

SEQ ID NO: 1419 - protein, 10 aa, synthetic construct
  REGION 1..10: note = Synthetic
SNTPDQGTSR

SEQ ID NO: 1420 - protein, 10 aa, synthetic construct
  REGION 1..10: note = Synthetic
GQQPAQGTQR

SEQ ID NO: 1421 - protein, 10 aa, synthetic construct
  REGION 1..10: note = Synthetic
NTIPGQGTSR

SEQ ID NO: 1422 - protein, 10 aa, synthetic construct
  REGION 1..10: note = Synthetic
SDRPSQGTDR

SEQ ID NO: 1423 - protein, 10 aa, synthetic construct
  REGION 1..10: note = Synthetic
SSAPIQGTTR

SEQ ID NO: 1424 - protein, 10 aa, synthetic construct
  REGION 1..10: note = Synthetic
RVEPSQGTER

SEQ ID NO: 1425 - protein, 10 aa, synthetic construct
  REGION 1..10: note = Synthetic
QHTPIQGTDR

SEQ ID NO: 1426 - protein, 10 aa, synthetic construct
  REGION 1..10: note = Synthetic
GTTPMQGTSR

SEQ ID NO: 1427 - protein, 10 aa, synthetic construct
  REGION 1..10: note = Synthetic
LEGPVQGTTR

SEQ ID NO: 1428 - protein, 10 aa, synthetic construct
  REGION 1..10: note = Synthetic
IGEPHQGTMR

SEQ ID NO: 1429 - protein, 10 aa, synthetic construct
  REGION 1..10: note = Synthetic
AGFPVQGTDR

SEQ ID NO: 1430 - protein, 10 aa, synthetic construct
  REGION 1..10: note = Synthetic
YSSPVQGTER

SEQ ID NO: 1431 - protein, 10 aa, synthetic construct
  REGION 1..10: note = Synthetic
MMTPGQGTPR

SEQ ID NO: 1432 - protein, 10 aa, synthetic construct
  REGION 1..10: note = Synthetic
SESPFQGTVR

SEQ ID NO: 1433 - protein, 10 aa, synthetic construct
  REGION 1..10: note = Synthetic
TVTPMQGTLR

SEQ ID NO: 1434 - protein, 10 aa, synthetic construct
  REGION 1..10: note = Synthetic
TEGPLQGTHR

SEQ ID NO: 1435 - protein, 10 aa, synthetic construct
  REGION 1..10: note = Synthetic
LRSPVQGTDR

SEQ ID NO: 1436 - protein, 10 aa, synthetic construct
  REGION 1..10: note = Synthetic
SVLPQQGTTR

SEQ ID NO: 1437 - protein, 10 aa, synthetic construct
  REGION 1..10: note = Synthetic
EEMPNQGTRR

SEQ ID NO: 1438 - protein, 10 aa, synthetic construct
  REGION 1..10: note = Synthetic
SRMPDQGTSR

SEQ ID NO: 1439 - protein, 10 aa, synthetic construct
  REGION 1..10: note = Synthetic
SISPLQGTTR

SEQ ID NO: 1440 - protein, 10 aa, synthetic construct
  REGION 1..10: note = Synthetic
GVHPDQGTGR

SEQ ID NO: 1441 - protein, 10 aa, synthetic construct
  REGION 1..10: note = Synthetic
GMMPVQGTGR

SEQ ID NO: 1442 - protein, 10 aa, synthetic construct
  REGION 1..10: note = Synthetic
MASPVQGTSR

SEQ ID NO: 1443 - protein, 10 aa, synthetic construct
  REGION 1..10: note = Synthetic
SPMPSQGTSR

SEQ ID NO: 1444 - protein, 10 aa, synthetic construct
  REGION 1..10: note = Synthetic
SAAPIQGTNR

SEQ ID NO: 1445 - protein, 10 aa, synthetic construct
  REGION 1..10: note = Synthetic
CDGPVQGTNR

SEQ ID NO: 1446 - protein, 10 aa, synthetic construct
  REGION 1..10: note = Synthetic
QHQPYQGTER

SEQ ID NO: 1447 - protein, 10 aa, synthetic construct
  REGION 1..10: note = Synthetic
YSYPTQGTTR

SEQ ID NO: 1448 - protein, 10 aa, synthetic construct
  REGION 1..10: note = Synthetic
IVGPSQGTAR

SEQ ID NO: 1449 - protein, 10 aa, synthetic construct
  REGION 1..10: note = Synthetic
TDKPVQGTDR

SEQ ID NO: 1450 - protein, 10 aa, synthetic construct
  REGION 1..10: note = Synthetic
GADPRQGTIR

SEQ ID NO: 1451 - protein, 10 aa, synthetic construct
  REGION 1..10: note = Synthetic
NTSPSQGTVR

SEQ ID NO: 1452 - protein, 10 aa, synthetic construct
  REGION 1..10: note = Synthetic
AGTPAQGTTR

SEQ ID NO: 1453 - protein, 10 aa, synthetic construct
  REGION 1..10: note = Synthetic
LRSPPQGTDR

SEQ ID NO: 1454 - protein, 10 aa, synthetic construct
  REGION 1..10: note = Synthetic
SDRPPQGTFR

SEQ ID NO: 1455 - protein, 10 aa, synthetic construct
  REGION 1..10: note = Synthetic
DAAPVQGTLR

SEQ ID NO: 1456 - protein, 10 aa, synthetic construct
  REGION 1..10: note = Synthetic
MGTPVQGTER

SEQ ID NO: 1457 - protein, 10 aa, synthetic construct
  REGION 1..10: note = Synthetic
NSCPGQGTCR

SEQ ID NO: 1458 - protein, 10 aa, synthetic construct
  REGION 1..10: note = Synthetic
VTSPAQGTNR

SEQ ID NO: 1459 - protein, 10 aa, synthetic construct
  REGION 1..10: note = Synthetic
SEQPSQGTQR

SEQ ID NO: 1460 - protein, 10 aa, synthetic construct
  REGION 1..10: note = Synthetic
SQAPPQGTLR

SEQ ID NO: 1461 - protein, 10 aa, synthetic construct
  REGION 1..10: note = Synthetic
ATTPGQGTGR

SEQ ID NO: 1462 - protein, 10 aa, synthetic construct
  REGION 1..10: note = Synthetic
LSGPGQGTYR

SEQ ID NO: 1463 - protein, 10 aa, synthetic construct
  REGION 1..10: note = Synthetic
LTVPEQGTVR

SEQ ID NO: 1464 - protein, 10 aa, synthetic construct
  REGION 1..10: note = Synthetic
EGKPEQGTYR

SEQ ID NO: 1465 - protein, 10 aa, synthetic construct
  REGION 1..10: note = Synthetic
SQNPNQGTDR

SEQ ID NO: 1466 - protein, 10 aa, synthetic construct
  REGION 1..10: note = Synthetic
SMIPGQGTVR

SEQ ID NO: 1467 - protein, 10 aa, synthetic construct
  REGION 1..10: note = Synthetic
ANAPNQGTMR

SEQ ID NO: 1468 - protein, 10 aa, synthetic construct
  REGION 1..10: note = Synthetic
QEGPLQGTQR

SEQ ID NO: 1469 - protein, 10 aa, synthetic construct
  REGION 1..10: note = Synthetic
MEPPLQGTTR

SEQ ID NO: 1470 - protein, 10 aa, synthetic construct
  REGION 1..10: note = Synthetic
ERAPYQGTDR

SEQ ID NO: 1471 - protein, 10 aa, synthetic construct
  REGION 1..10: note = Synthetic
LEGPTQGTAR

SEQ ID NO: 1472 - protein, 10 aa, synthetic construct
  REGION 1..10: note = Synthetic
LRQPDQGTTR

SEQ ID NO: 1473 - protein, 10 aa, synthetic construct
  REGION 1..10: note = Synthetic
DRMPGQGTSR

SEQ ID NO: 1474 - protein, 10 aa, synthetic construct
  REGION 1..10: note = Synthetic
EGGPVQGTQR

SEQ ID NO: 1475 - protein, 10 aa, synthetic construct
  REGION 1..10: note = Synthetic
EGLPIQGTTR

SEQ ID NO: 1476 - protein, 10 aa, synthetic construct
  REGION 1..10: note = Synthetic
SSTPVQGTVR

SEQ ID NO: 1477 - protein, 10 aa, synthetic construct
  REGION 1..10: note = Synthetic
VVGPTQGTER

SEQ ID NO: 1478 - protein, 10 aa, synthetic construct
  REGION 1..10: note = Synthetic
SVVPVQGTQR

SEQ ID NO: 1479 - protein, 10 aa, synthetic construct
  REGION 1..10: note = Synthetic
SLGPPQGTLR

SEQ ID NO: 1480 - protein, 10 aa, synthetic construct
  REGION 1..10: note = Synthetic
SFTPVQGTSR

SEQ ID NO: 1481 - protein, 10 aa, synthetic construct
  REGION 1..10: note = Synthetic
DGRPYQGTTR

SEQ ID NO: 1482 - protein, 10 aa, synthetic construct
  REGION 1..10: note = Synthetic
ASVPVQGTGR

SEQ ID NO: 1483 - protein, 10 aa, synthetic construct
  REGION 1..10: note = Synthetic
ATAPVQGTNR

SEQ ID NO: 1484 - protein, 10 aa, synthetic construct
  REGION 1..10: note = Synthetic
SAAPYQGTSR

SEQ ID NO: 1485 - protein, 10 aa, synthetic construct
  REGION 1..10: note = Synthetic
AGLPIQGTTR

SEQ ID NO: 1486 - protein, 10 aa, synthetic construct
  REGION 1..10: note = Synthetic
SKVPAQGTER

SEQ ID NO: 1487 - protein, 10 aa, synthetic construct
  REGION 1..10: note = Synthetic
ASAPMQGTMR

SEQ ID NO: 1488 - protein, 10 aa, synthetic construct
  REGION 1..10: note = Synthetic
SAYPTQGTMR

SEQ ID NO: 1489 - protein, 10 aa, synthetic construct
  REGION 1..10: note = Synthetic
VTGPDQGTGR

SEQ ID NO: 1490 - protein, 10 aa, synthetic construct
  REGION 1..10: note = Synthetic
MTQPGQGTIR

SEQ ID NO: 1491 - protein, 10 aa, synthetic construct
  REGION 1..10: note = Synthetic
ALGPSQGTSR

SEQ ID NO: 1492 - protein, 10 aa, synthetic construct
  REGION 1..10: note = Synthetic
GVIPVQGTSR

SEQ ID NO: 1493 - protein, 10 aa, synthetic construct
  REGION 1..10: note = Synthetic
CEVPSQGTAR

SEQ ID NO: 1494 - protein, 10 aa, synthetic construct
  REGION 1..10: note = Synthetic
SNAPAQGTVR

SEQ ID NO: 1495 - protein, 10 aa, synthetic construct
  REGION 1..10: note = Synthetic
SAQPNQGTPR

SEQ ID NO: 1496 - protein, 10 aa, synthetic construct
  REGION 1..10: note = Synthetic
ETGPAQGTAR

SEQ ID NO: 1497 - protein, 10 aa, synthetic construct
  REGION 1..10: note = Synthetic
GVSPAQGTVR

SEQ ID NO: 1498 - protein, 10 aa, synthetic construct
  REGION 1..10: note = Synthetic
EGAPSQGTYR

SEQ ID NO: 1499 - protein, 10 aa, synthetic construct
  REGION 1..10: note = Synthetic
EATPSQGTMR

SEQ ID NO: 1500 - protein, 10 aa, synthetic construct
  REGION 1..10: note = Synthetic
GTEPKQGTLR

SEQ ID NO: 1501 - protein, 10 aa, synthetic construct
  REGION 1..10: note = Synthetic
MEHPTQGTGR

SEQ ID NO: 1502 - protein, 10 aa, synthetic construct
  REGION 1..10: note = Synthetic
SEMPSQGTSR

SEQ ID NO: 1503 - protein, 10 aa, synthetic construct
  REGION 1..10: note = Synthetic
GVLPGQGTGR

SEQ ID NO: 1504 - protein, 10 aa, synthetic construct
  REGION 1..10: note = Synthetic
GPLPVQGTMR

SEQ ID NO: 1505 - protein, 10 aa, synthetic construct
  REGION 1..10: note = Synthetic
SALPDQGTAR

SEQ ID NO: 1506 - protein, 10 aa, synthetic construct
  REGION 1..10: note = Synthetic
MATPTQGTSR

SEQ ID NO: 1507 - protein, 10 aa, synthetic construct
  REGION 1..10: note = Synthetic
NGTPEQGTTR

SEQ ID NO: 1508 - protein, 10 aa, synthetic construct
  REGION 1..10: note = Synthetic
GTVPYQGTGR

SEQ ID NO: 1509 - protein, 10 aa, synthetic construct
  REGION 1..10: note = Synthetic
GGNPVQGTAR

SEQ ID NO: 1510 - protein, 10 aa, synthetic construct
  REGION 1..10: note = Synthetic
FEAPSQGTGR

SEQ ID NO: 1511 - protein, 10 aa, synthetic construct
  REGION 1..10: note = Synthetic
AHAPLQGTAR

SEQ ID NO: 1512 - protein, 10 aa, synthetic construct
  REGION 1..10: note = Synthetic
MNGPQQGTLR

SEQ ID NO: 1513 - protein, 10 aa, synthetic construct
  REGION 1..10: note = Synthetic
MQGPTQGTDR

SEQ ID NO: 1514 - protein, 10 aa, synthetic construct
  REGION 1..10: note = Synthetic
TASPSQGTTR

SEQ ID NO: 1515 - protein, 10 aa, synthetic construct
  REGION 1..10: note = Synthetic
SESPSQGTSR

SEQ ID NO: 1516 - protein, 10 aa, synthetic construct
  REGION 1..10: note = Synthetic
MMHPVQGTER

SEQ ID NO: 1517 - protein, 10 aa, synthetic construct
  REGION 1..10: note = Synthetic
ETGPPQGTMR

SEQ ID NO: 1518 - protein, 10 aa, synthetic construct
  REGION 1..10: note = Synthetic
NHTPAQGTQR

SEQ ID NO: 1519 - protein, 10 aa, synthetic construct
  REGION 1..10: note = Synthetic
TNVPSQGTMR

SEQ ID NO: 1520 - protein, 10 aa, synthetic construct
  REGION 1..10: note = Synthetic
LEHPTQGTGR

SEQ ID NO: 1521 - protein, 10 aa, synthetic construct
  REGION 1..10: note = Synthetic
SSGPNQGTVR

SEQ ID NO: 1522 - protein, 10 aa, synthetic construct
  REGION 1..10: note = Synthetic
GQKPDQGTVR

SEQ ID NO: 1523 - protein, 10 aa, synthetic construct
  REGION 1..10: note = Synthetic
TMLPVQGTGR

SEQ ID NO: 1524 - protein, 10 aa, synthetic construct
  REGION 1..10: note = Synthetic
CANPVQGTNR

SEQ ID NO: 1525 - protein, 10 aa, synthetic construct
  REGION 1..10: note = Synthetic
GSDPSQGTMR

SEQ ID NO: 1526 - protein, 10 aa, synthetic construct
  REGION 1..10: note = Synthetic
DGSPVQGTGR

SEQ ID NO: 1527 - protein, 10 aa, synthetic construct
  REGION 1..10: note = Synthetic
TYNPTQGTVR

SEQ ID NO: 1528 - protein, 10 aa, synthetic construct
  REGION 1..10: note = Synthetic
WLGPGQGTER

SEQ ID NO: 1529 - protein, 10 aa, synthetic construct
  REGION 1..10: note = Synthetic
TPYPNQGTER

SEQ ID NO: 1530 - protein, 10 aa, synthetic construct
  REGION 1..10: note = Synthetic
SMHPTQGTAR

SEQ ID NO: 1531 - protein, 10 aa, synthetic construct
  REGION 1..10: note = Synthetic
STQPTQGTDR

SEQ ID NO: 1532 - protein, 10 aa, synthetic construct
  REGION 1..10: note = Synthetic
NRQPDQGTAR

SEQ ID NO: 1533 - protein, 10 aa, synthetic construct
  REGION 1..10: note = Synthetic
SESPVQGTVR

SEQ ID NO: 1534 - protein, 10 aa, synthetic construct
  REGION 1..10: note = Synthetic
FEVPQQGTLR

SEQ ID NO: 1535 - protein, 10 aa, synthetic construct
  REGION 1..10: note = Synthetic
IETPAQGTGR

SEQ ID NO: 1536 - protein, 10 aa, synthetic construct
  REGION 1..10: note = Synthetic
ISDPNQGTAR

SEQ ID NO: 1537 - protein, 10 aa, synthetic construct
  REGION 1..10: note = Synthetic
EFGPTQGTLR

SEQ ID NO: 1538 - protein, 10 aa, synthetic construct
  REGION 1..10: note = Synthetic
LDHPTQGTIR

SEQ ID NO: 1539 - protein, 10 aa, synthetic construct
  REGION 1..10: note = Synthetic
TDAPTQGTMR

SEQ ID NO: 1540 - protein, 10 aa, synthetic construct
  REGION 1..10: note = Synthetic
CEGPKQGTDR

SEQ ID NO: 1541 - protein, 10 aa, synthetic construct
  REGION 1..10: note = Synthetic
LGSPSQGTTR

SEQ ID NO: 1542 - protein, 10 aa, synthetic construct
  REGION 1..10: note = Synthetic
ATQPDQGTGR

SEQ ID NO: 1543 - protein, 10 aa, synthetic construct
  REGION 1..10: note = Synthetic
YATPSQGTVR

SEQ ID NO: 1544 - protein, 10 aa, synthetic construct
  REGION 1..10: note = Synthetic
MSGPSQGTNR

SEQ ID NO: 1545 - protein, 10 aa, synthetic construct
  REGION 1..10: note = Synthetic
GTMPQQGTGR

SEQ ID NO: 1546 - protein, 10 aa, synthetic construct
  REGION 1..10: note = Synthetic
MTSPDQGTMR

SEQ ID NO: 1547 - protein, 10 aa, synthetic construct
  REGION 1..10: note = Synthetic
AGSPTQGTLR

SEQ ID NO: 1548 - protein, 10 aa, synthetic construct
  REGION 1..10: note = Synthetic
ASDPKQGTYR

SEQ ID NO: 1549 - protein, 10 aa, synthetic construct
  REGION 1..10: note = Synthetic
GNTPSQGTVR

SEQ ID NO: 1550 - protein, 10 aa, synthetic construct
  REGION 1..10: note = Synthetic
GMEPPQGTVR

SEQ ID NO: 1551 - protein, 10 aa, synthetic construct
  REGION 1..10: note = Synthetic
GSPPEQGTGR

SEQ ID NO: 1552 - protein, 10 aa, synthetic construct
  REGION 1..10: note = Synthetic
LQAPSQGTAR

SEQ ID NO: 1553 - protein, 10 aa, synthetic construct
  REGION 1..10: note = Synthetic
LNGPVQGTTR

SEQ ID NO: 1554 - protein, 10 aa, synthetic construct
  REGION 1..10: note = Synthetic
YCTPQQGTTR

SEQ ID NO: 1555 - protein, 10 aa, synthetic construct
  REGION 1..10: note = Synthetic
HTDPTQGTGR

SEQ ID NO: 1556 - protein, 10 aa, synthetic construct
  REGION 1..10: note = Synthetic
SSYPAQGTAR

SEQ ID NO: 1557 - protein, 10 aa, synthetic construct
  REGION 1..10: note = Synthetic
SNSPPQGTER

SEQ ID NO: 1558 - protein, 10 aa, synthetic construct
  REGION 1..10: note = Synthetic
TEMPVQGTVR

SEQ ID NO: 1559 - protein, 10 aa, synthetic construct
  REGION 1..10: note = Synthetic
ARDPMQGTGR

SEQ ID NO: 1560 - protein, 10 aa, synthetic construct
  REGION 1..10: note = Synthetic
GGAPVQGTSR

SEQ ID NO: 1561 - protein, 10 aa, synthetic construct
  REGION 1..10: note = Synthetic
TTSPSQGTAR

SEQ ID NO: 1562 - protein, 10 aa, synthetic construct
  REGION 1..10: note = Synthetic
YTSPVQGTVR

SEQ ID NO: 1563 - protein, 10 aa, synthetic construct
  REGION 1..10: note = Synthetic
STEPDQGTKR

SEQ ID NO: 1564 - protein, 10 aa, synthetic construct
  REGION 1..10: note = Synthetic
EGNPAQGTVR

SEQ ID NO: 1565 - protein, 10 aa, synthetic construct
  REGION 1..10: note = Synthetic
MGVPEQGTTR

SEQ ID NO: 1566 - protein, 10 aa, synthetic construct
  REGION 1..10: note = Synthetic
EGSPYQGTDR

SEQ ID NO: 1567 - protein, 10 aa, synthetic construct
  REGION 1..10: note = Synthetic
LESPSQGTGR

SEQ ID NO: 1568 - protein, 10 aa, synthetic construct
  REGION 1..10: note = Synthetic
GQLPSQGTGR

SEQ ID NO: 1569 - protein, 10 aa, synthetic construct
  REGION 1..10: note = Synthetic
GHNPDQGTVR

SEQ ID NO: 1570 - protein, 10 aa, synthetic construct
  REGION 1..10: note = Synthetic
MAAPVQGTPR

SEQ ID NO: 1571 - protein, 10 aa, synthetic construct
  REGION 1..10: note = Synthetic
AVIPTQGTSR

SEQ ID NO: 1572 - protein, 10 aa, synthetic construct
  REGION 1..10: note = Synthetic
VTTPLQGTDR

SEQ ID NO: 1573 - protein, 10 aa, synthetic construct
  REGION 1..10: note = Synthetic
THLPGQGTGR

SEQ ID NO: 1574 - protein, 10 aa, synthetic construct
  REGION 1..10: note = Synthetic
QMMPSQGTVR

SEQ ID NO: 1575 - protein, 10 aa, synthetic construct
  REGION 1..10: note = Synthetic
TAWPTQGTTR

SEQ ID NO: 1576 - protein, 10 aa, synthetic construct
  REGION 1..10: note = Synthetic
ESEPRQGTTR

SEQ ID NO: 1577 - protein, 10 aa, synthetic construct
  REGION 1..10: note = Synthetic
NAGPDQGTVR

SEQ ID NO: 1578 - protein, 10 aa, synthetic construct
  REGION 1..10: note = Synthetic
TSYPVQGTLR

SEQ ID NO: 1579 - protein, 10 aa, synthetic construct
  REGION 1..10: note = Synthetic
MASPIQGTTR

SEQ ID NO: 1580 - protein, 10 aa, synthetic construct
  REGION 1..10: note = Synthetic
TNSPGQGTVR

SEQ ID NO: 1581 - protein, 10 aa, synthetic construct
  REGION 1..10: note = Synthetic
SGEPVQGTVR

SEQ ID NO: 1582 - protein, 10 aa, synthetic construct
  REGION 1..10: note = Synthetic
NSLPKQGTDR

SEQ ID NO: 1583 - protein, 10 aa, synthetic construct
  REGION 1..10: note = Synthetic
MANPSQGTVR

SEQ ID NO: 1584 - protein, 10 aa, synthetic construct
  REGION 1..10: note = Synthetic
AQAPLQGTPR

SEQ ID NO: 1585 - protein, 10 aa, synthetic construct
  REGION 1..10: note = Synthetic
GSMPAQGTNR

SEQ ID NO: 1586 - protein, 10 aa, synthetic construct
  REGION 1..10: note = Synthetic
SAGPLQGTAR

SEQ ID NO: 1587 - protein, 10 aa, synthetic construct
  REGION 1..10: note = Synthetic
SESPSQGTHR

SEQ ID NO: 1588 - protein, 10 aa, synthetic construct
  REGION 1..10: note = Synthetic
QGLPTQGTPR

SEQ ID NO: 1589 - protein, 10 aa, synthetic construct
  REGION 1..10: note = Synthetic
YTSPIQGTNR

SEQ ID NO: 1590 - protein, 10 aa, synthetic construct
  REGION 1..10: note = Synthetic
LVDPIQGTIR

SEQ ID NO: 1591 - protein, 10 aa, synthetic construct
  REGION 1..10: note = Synthetic
MGYPMQGTGR

SEQ ID NO: 1592 - protein, 10 aa, synthetic construct
  REGION 1..10: note = Synthetic
SPVPKQGTER

SEQ ID NO: 1593 - protein, 10 aa, synthetic construct
  REGION 1..10: note = Synthetic
SMHPTQGTAR

SEQ ID NO: 1594 - protein, 10 aa, synthetic construct
  REGION 1..10: note = Synthetic
DSKPPQGTSR

SEQ ID NO: 1595 - protein, 10 aa, synthetic construct
  REGION 1..10: note = Synthetic
TQMPDQGTHR

SEQ ID NO: 1596 - protein, 10 aa, synthetic construct
  REGION 1..10: note = Synthetic
AAVPVQGTPR

SEQ ID NO: 1597 - protein, 10 aa, synthetic construct
  REGION 1..10: note = Synthetic
GMMPAQGTNR

SEQ ID NO: 1598 - protein, 10 aa, synthetic construct
  REGION 1..10: note = Synthetic
SWSPIQGTSR

SEQ ID NO: 1599 - protein, 10 aa, synthetic construct
  REGION 1..10: note = Synthetic
INSPIQGTAR

SEQ ID NO: 1600 - protein, 10 aa, synthetic construct
  REGION 1..10: note = Synthetic
CSVPNQGTGR

SEQ ID NO: 1601 - protein, 10 aa, synthetic construct
  REGION 1..10: note = Synthetic
SATPTQGTFR

SEQ ID NO: 1602 - protein, 10 aa, synthetic construct
  REGION 1..10: note = Synthetic
SWTPNQGTNR

SEQ ID NO: 1603 - protein, 10 aa, synthetic construct
  REGION 1..10: note = Synthetic
SISPTQGTGR

SEQ ID NO: 1604 - protein, 10 aa, synthetic construct
  REGION 1..10: note = Synthetic
SSEPNQGTPR

SEQ ID NO: 1605 - protein, 10 aa, synthetic construct
  REGION 1..10: note = Synthetic
YSSPVQGTER

SEQ ID NO: 1606 - protein, 10 aa, synthetic construct
  REGION 1..10: note = Synthetic
LHTPSQGTPR

SEQ ID NO: 1607 - protein, 10 aa, synthetic construct
  REGION 1..10: note = Synthetic
SESPFQGTVR

SEQ ID NO: 1608 - protein, 10 aa, synthetic construct
  REGION 1..10: note = Synthetic
TDGPGQGTAR

SEQ ID NO: 1609 - protein, 10 aa, synthetic construct
  REGION 1..10: note = Synthetic
GAIPNQGTTR

SEQ ID NO: 1610 - protein, 10 aa, synthetic construct
  REGION 1..10: note = Synthetic
GNGPSQGTTR

SEQ ID NO: 1611 - protein, 10 aa, synthetic construct
  REGION 1..10: note = Synthetic
EEMPNQGTRR

SEQ ID NO: 1612 - protein, 10 aa, synthetic construct
  REGION 1..10: note = Synthetic
SRMPDQGTSR

SEQ ID NO: 1613 - protein, 10 aa, synthetic construct
  REGION 1..10: note = Synthetic
DSKPGQGTMR

SEQ ID NO: 1614 - protein, 10 aa, synthetic construct
  REGION 1..10: note = Synthetic
SISPLQGTTR

SEQ ID NO: 1615 - protein, 10 aa, synthetic construct
  REGION 1..10: note = Synthetic
SPMPSQGTSR

SEQ ID NO: 1616 - protein, 10 aa, synthetic construct
  REGION 1..10: note = Synthetic
NTSPSQGTVR

SEQ ID NO: 1617 - protein, 10 aa, synthetic construct
  REGION 1..10: note = Synthetic
SDRPPQGTFR

SEQ ID NO: 1618 - protein, 10 aa, synthetic construct
  REGION 1..10: note = Synthetic
AATPTQGTTR

SEQ ID NO: 1619 - protein, 10 aa, synthetic construct
  REGION 1..10: note = Synthetic
DAAPVQGTLR

SEQ ID NO: 1620 - protein, 10 aa, synthetic construct
  REGION 1..10: note = Synthetic
NSGPGQGTMR

SEQ ID NO: 1621 - protein, 10 aa, synthetic construct
  REGION 1..10: note = Synthetic
SPMPSQGTSR

SEQ ID NO: 1622 - protein, 10 aa, synthetic construct
  REGION 1..10: note = Synthetic
TSSPTQGTMR

SEQ ID NO: 1623 - protein, 10 aa, synthetic construct
  REGION 1..10: note = Synthetic
IKSPDQGTGR

SEQ ID NO: 1624 - protein, 10 aa, synthetic construct
  REGION 1..10: note = Synthetic
KSEPVQGTTR

SEQ ID NO: 1625 - protein, 10 aa, synthetic construct
  REGION 1..10: note = Synthetic
QYSPQQGTGR

SEQ ID NO: 1626 - protein, 10 aa, synthetic construct
  REGION 1..10: note = Synthetic
SQAPPQGTLR

SEQ ID NO: 1627 - protein, 10 aa, synthetic construct
  REGION 1..10: note = Synthetic
AGVPIQGTER

SEQ ID NO: 1628 - protein, 10 aa, synthetic construct
  REGION 1..10: note = Synthetic
GTSPIQGTLR

SEQ ID NO: 1629 - protein, 10 aa, synthetic construct
  REGION 1..10: note = Synthetic
GGTPAQGTQR

SEQ ID NO: 1630 - protein, 10 aa, synthetic construct
  REGION 1..10: note = Synthetic
MLMPSQGTDR

SEQ ID NO: 1631 - protein, 10 aa, synthetic construct
  REGION 1..10: note = Synthetic
VSAPSQGTQR

SEQ ID NO: 1632 - protein, 10 aa, synthetic construct
  REGION 1..10: note = Synthetic
LRTPVQGTDR

SEQ ID NO: 1633 - protein, 10 aa, synthetic construct
  REGION 1..10: note = Synthetic
RVEPSQGTER

SEQ ID NO: 1634 - protein, 10 aa, synthetic construct
  REGION 1..10: note = Synthetic
TSLPQQGTSR

SEQ ID NO: 1635 - protein, 10 aa, synthetic construct
  REGION 1..10: note = Synthetic
QEGPLQGTQR

SEQ ID NO: 1636 - protein, 10 aa, synthetic construct
  REGION 1..10: note = Synthetic
DAGPNQGTAR

SEQ ID NO: 1637 - protein, 10 aa, synthetic construct
  REGION 1..10: note = Synthetic
STNPTQGTVR

SEQ ID NO: 1638 - protein, 10 aa, synthetic construct
  REGION 1..10: note = Synthetic
MEPPLQGTTR

SEQ ID NO: 1639 - protein, 10 aa, synthetic construct
  REGION 1..10: note = Synthetic
NSVPGQGTLR

SEQ ID NO: 1640 - protein, 10 aa, synthetic construct
  REGION 1..10: note = Synthetic
GMAPGQGTAR

SEQ ID NO: 1641 - protein, 10 aa, synthetic construct
  REGION 1..10: note = Synthetic
LRQPDQGTTR

SEQ ID NO: 1642 - protein, 10 aa, synthetic construct
  REGION 1..10: note = Synthetic
TANPNQGTYR

SEQ ID NO: 1643 - protein, 10 aa, synthetic construct
  REGION 1..10: note = Synthetic
MAMPAQGTLR

SEQ ID NO: 1644 - protein, 10 aa, synthetic construct
  REGION 1..10: note = Synthetic
SNLPGQGTLR

SEQ ID NO: 1645 - protein, 10 aa, synthetic construct
  REGION 1..10: note = Synthetic
EGVPRQGTDR

SEQ ID NO: 1646 - protein, 10 aa, synthetic construct
  REGION 1..10: note = Synthetic
QVSPTQGTSR

SEQ ID NO: 1647 - protein, 10 aa, synthetic construct
  REGION 1..10: note = Synthetic
NAGPSQGTSR

SEQ ID NO: 1648 - protein, 10 aa, synthetic construct
  REGION 1..10: note = Synthetic
GTTPMQGTSR

SEQ ID NO: 1649 - protein, 10 aa, synthetic construct
  REGION 1..10: note = Synthetic
SAAPYQGTSR

SEQ ID NO: 1650 - protein, 10 aa, synthetic construct
  REGION 1..10: note = Synthetic
TVTPMQGTLR

SEQ ID NO: 1651 - protein, 10 aa, synthetic construct
  REGION 1..10: note = Synthetic
SEAPTQGTGR

SEQ ID NO: 1652 - protein, 10 aa, synthetic construct
  REGION 1..10: note = Synthetic
MMTPGQGTPR

SEQ ID NO: 1653 - protein, 10 aa, synthetic construct
  REGION 1..10: note = Synthetic
SVLPQQGTTR

SEQ ID NO: 1654 - protein, 10 aa, synthetic construct
  REGION 1..10: note = Synthetic
SGEPPQGTNR

SEQ ID NO: 1655 - protein, 10 aa, synthetic construct
  REGION 1..10: note = Synthetic
ALGPSQGTSR

SEQ ID NO: 1656 - protein, 10 aa, synthetic construct
  REGION 1..10: note = Synthetic
DGTPYQGTSR

SEQ ID NO: 1657 - protein, 10 aa, synthetic construct
  REGION 1..10: note = Synthetic
TEVPKQGTPR

SEQ ID NO: 1658 - protein, 10 aa, synthetic construct
  REGION 1..10: note = Synthetic
LPTPSQGTSR

SEQ ID NO: 1659 - protein, 10 aa, synthetic construct
  REGION 1..10: note = Synthetic
SVTPVQGTLR

SEQ ID NO: 1660 - protein, 10 aa, synthetic construct
  REGION 1..10: note = Synthetic
MYKPIQGTER

SEQ ID NO: 1661 - protein, 10 aa, synthetic construct
  REGION 1..10: note = Synthetic
MGTPVQGTER

SEQ ID NO: 1662 - protein, 10 aa, synthetic construct
  REGION 1..10: note = Synthetic
SDGPGQGTGR

SEQ ID NO: 1663 - protein, 10 aa, synthetic construct
  REGION 1..10: note = Synthetic
LQYPEQGTER

SEQ ID NO: 1664 - protein, 10 aa, synthetic construct
  REGION 1..10: note = Synthetic
AMQPVQGTAR

SEQ ID NO: 1665 - protein, 10 aa, synthetic construct
  REGION 1..10: note = Synthetic
MMNPGQGTLR

SEQ ID NO: 1666 - protein, 10 aa, synthetic construct
  REGION 1..10: note = Synthetic
SHLPNQGTVR

SEQ ID NO: 1667 - protein, 10 aa, synthetic construct
  REGION 1..10: note = Synthetic
ANSPVQGTVR

SEQ ID NO: 1668 - protein, 10 aa, synthetic construct
  REGION 1..10: note = Synthetic
GSAPDQGTLR

SEQ ID NO: 1669 - protein, 10 aa, synthetic construct
  REGION 1..10: note = Synthetic
VENPTQGTYR

SEQ ID NO: 1670 - protein, 10 aa, synthetic construct
  REGION 1..10: note = Synthetic
LGQPPQGTSR

SEQ ID NO: 1671 - protein, 10 aa, synthetic construct
  REGION 1..10: note = Synthetic
WAGPSQGTLR

SEQ ID NO: 1672 - protein, 10 aa, synthetic construct
  REGION 1..10: note = Synthetic
ANNPSQGTFR

SEQ ID NO: 1673 - protein, 10 aa, synthetic construct
  REGION 1..10: note = Synthetic
NQIPLQGTLR

SEQ ID NO: 1674 - protein, 10 aa, synthetic construct
  REGION 1..10: note = Synthetic
SNSPVQGTMR

SEQ ID NO: 1675 - protein, 10 aa, synthetic construct
  REGION 1..10: note = Synthetic
EVGPTQGTTR

SEQ ID NO: 1676 - protein, 10 aa, synthetic construct
  REGION 1..10: note = Synthetic
TVKPTQGTER

SEQ ID NO: 1677 - protein, 10 aa, synthetic construct
  REGION 1..10: note = Synthetic
MASPVQGTSR

SEQ ID NO: 1678 - protein, 10 aa, synthetic construct
  REGION 1..10: note = Synthetic
SWGPGQGTIR

SEQ ID NO: 1679 - protein, 10 aa, synthetic construct
  REGION 1..10: note = Synthetic
AETPNQGTFR

SEQ ID NO: 1680 - protein, 10 aa, synthetic construct
  REGION 1..10: note = Synthetic
GVHPDQGTGR

SEQ ID NO: 1681 - protein, 10 aa, synthetic construct
  REGION 1..10: note = Synthetic
GMMPVQGTGR

SEQ ID NO: 1682 - protein, 10 aa, synthetic construct
  REGION 1..10: note = Synthetic
AAVPLQGTTR

SEQ ID NO: 1683 - protein, 10 aa, synthetic construct
  REGION 1..10: note = Synthetic
SEVPIQGTVR

SEQ ID NO: 1684 - protein, 10 aa, synthetic construct
  REGION 1..10: note = Synthetic
MTLPGQGTPR

SEQ ID NO: 1685 - protein, 10 aa, synthetic construct
  REGION 1..10: note = Synthetic
SDRPDQGTAR

SEQ ID NO: 1686 - protein, 10 aa, synthetic construct
  REGION 1..10: note = Synthetic
MQVPTQGTSR

SEQ ID NO: 1687 - protein, 10 aa, synthetic construct
  REGION 1..10: note = Synthetic
MNGPLQGTSR

SEQ ID NO: 1688 - protein, 10 aa, synthetic construct
  REGION 1..10: note = Synthetic
NDKPVQGTAR

SEQ ID NO: 1689 - protein, 10 aa, synthetic construct
  REGION 1..10: note = Synthetic
LSNPVQGTGR

SEQ ID NO: 1690 - protein, 10 aa, synthetic construct
  REGION 1..10: note = Synthetic
SLTPVQGTQR

SEQ ID NO: 1691 - protein, 10 aa, synthetic construct
  REGION 1..10: note = Synthetic
AVTPVQGTSR

SEQ ID NO: 1692 - protein, 10 aa, synthetic construct
  REGION 1..10: note = Synthetic
AGFPVQGTDR

SEQ ID NO: 1693 - protein, 10 aa, synthetic construct
  REGION 1..10: note = Synthetic
AGTPAQGTTR

SEQ ID NO: 1694 - protein, 10 aa, synthetic construct
  REGION 1..10: note = Synthetic
RDSPGQGTER

SEQ ID NO: 1695 - protein, 10 aa, synthetic construct
  REGION 1..10: note = Synthetic
LDSPYQGTGR

SEQ ID NO: 1696 - protein, 10 aa, synthetic construct
  REGION 1..10: note = Synthetic
GSLPIQGTSR

SEQ ID NO: 1697 - protein, 10 aa, synthetic construct
  REGION 1..10: note = Synthetic
SGQPWQGTDR

SEQ ID NO: 1698 - protein, 10 aa, synthetic construct
  REGION 1..10: note = Synthetic
GQVPTQGTNR

SEQ ID NO: 1699 - protein, 10 aa, synthetic construct
  REGION 1..10: note = Synthetic
  SITE 1: note = Xaa = 0, 1, 2, or 3
  SITE 4: note = Xaa = S, T or A
  SITE 8: note = Xaa = L, V, F, or I
  SITE 10: note = Xaa = 0, 1, 2, 3, 4, 5, 6, or 7
XMPXQGTXRX

SEQ ID NO: 1700 - protein, 5 aa, synthetic construct
  REGION 1..5: note = Synthetic
VITYF

SEQ ID NO: 1701 - protein, 5 aa, synthetic construct
  REGION 1..5: note = Synthetic
VVVVV

SEQ ID NO: 1702 - protein, 7 aa, synthetic construct
  REGION 1..7: note = Synthetic
KPWWPRR

SEQ ID NO: 1703 - protein, 9 aa, synthetic construct
  REGION 1..9: note = Synthetic
NIVNVSLVK

SEQ ID NO: 1704 - protein, 5 aa, synthetic construct
  REGION 1..5: note = Synthetic
LPFFD

SEQ ID NO: 1705 - protein, 4 aa, synthetic construct
  REGION 1..4: note = Synthetic
KLVF

SEQ ID NO: 1706 - protein, 7 aa, synthetic construct
  REGION 1..7: note = Synthetic
PGKLVYA

SEQ ID NO: 1707 - protein, 7 aa, synthetic construct
  REGION 1..7: note = Synthetic
LVEALYL

SEQ ID NO: 1708 - protein, 6 aa, synthetic construct
  REGION 1..6: note = Synthetic
RGFFYT

SEQ ID NO: 1709 - protein, 15 aa, synthetic construct
  REGION 1..15: note = Synthetic
GGGGGGGGGGGGGGG

SEQ ID NO: 1710 - protein, 15 aa, synthetic construct
  REGION 1..15: note = Synthetic
GGGGSGGGGSGGGGS
